(19) United States
(12) Patent Application Publication
(10) Pub. No.: US 2008/0118968 A1
(43) Pub. Date: May 22, 2008

(54) Nucleic acid sequences from Cyanidium caldarium and uses thereof

(76) Inventors: Dane K. Fisher, O'fallon, MO (US); Raghunath V. Lalgudi, Clayton, MO (US)

Correspondence Address: ARNOLD & PORTER, LLP, 555 TWELFTH STREET, N.W., ATTN: IP DOCKETING, WASHINGTON, DC, 20004, US

(21) Appl. No.: 11/312,734

(22) Filed: Dec. 21, 2005

Related U.S. Application Data
(63) Continuation of application No. 09/540,235, filed on Apr. 3, 2000, now abandoned.
(60) Provisional application No. 60/128,439, filed on Apr. 6, 1999.

(51) Int. Cl. C12N 9/22; C07H 21/04; C12N 5/06; C12N 5/04; C12N 1/12

(52) U.S. Cl. 435/199; 435/419; 435/257.1; 536/23.2; 435/348; 435/254.1

(57) ABSTRACT

Expressed Sequence Tags (ESTs) isolated from the unicellular red algae, Cyanidium caldarium, are disclosed. The invention encompasses nucleic acid molecules that encode Cyanidium caldarium protein homologs and fragments therof. In addition, antibodies capable of binding the proteins are encompassed by the present invention. The disclosed ESTs have particular utility in isolating genes and promoters, identifying and mapping the genes involved in developmental and metabolic pathways, and determining gene function. The ESTs provide a unique molecular tool for the targeting and isolation of novel genes for plant protection and improvement. The invention also relates to methods of using the disclosed nucleic acid molecules, proteins, fragments of proteins, and antibodies, for example, for gene identification and analysis, and preparation of constructs.

### CROSS-REFERENCE TO RELATED APPLICATIONS

[0001] This application is a continuation under 35 U.S.C. §120 of U.S. application Ser. No. 09/540,235 filed Apr. 3, 2000 (herein incorporated by reference in its entirety), which claims priority under 35 U.S.C §119(e) of U.S. Provisional Application Ser. No. 60/128,439 filed on Apr. 6, 1999 (herein incorporated by reference in its entirety).

### INCORPORATION OF SEQUENCE LISTING

[0002] This application contains a sequence listing, which is contained on three identical CD-ROMs: two copies of the sequence listing (Copy 1 and Copy 2) and a sequence listing Computer Readable Form (CRF), all of which are herein incorporated by reference. All three CD-ROMs each contain one file called “15749C seq list.txt” which is 3,721,305 byes in size (measured in Windows XP) and which was created on Dec. 20, 2005.

### FIELD OF THE INVENTION

[0003] The present invention is in the field of molecular biology; more particularly, the present invention relates to nucleic acid sequences from the unicellular red algae, Cyanidium caldarium. The invention encompasses nucleic acid molecules that encode proteins and fragments of proteins. In addition, proteins and fragments of proteins so encoded and antibodies capable of binding the proteins are encompassed by the present invention. The invention also relates to methods of using the disclosed nucleic acid molecules, proteins, fragments of proteins, and antibodies, for example, for gene identification and analysis, and preparation of constructs.

### BACKGROUND OF THE INVENTION

### I. Cyanidium caldarium

[0004] The present invention relates in part to DNA sequences from cDNA libraries from the unicellular red algae, Cyanidium caldarium. Cyanidium belongs to the eucaryotic cell category of algae and was first identified in the thermal areas of Yellowstone National Park (Tilden, Botanical Gazette, 25: 89-105 (1898), herein incorporated by reference in its entirety). The eukaryotic red alga, Cyanidium caldarium, is both acidophilic and thermophilic. This alga is the sole photosynthetic organism in habitats with temperatures greater than 40° C. and pH less than 5. The upper temperature limit for the unicellular red algae Cyanidium caldarium is 55° C. to 60° C. and optimum temperature for growth is 45° C. (Doemel and Brock, J. Gene. Microbiol. 67:17-32 (1971), herein incorporated by reference in its entirety). The lower temperature limits for the algae are 35° C. to 36° C. in aquatic habitats and 10° C. in soils. Its growth is favored by high temperatures and low pH that exclude other photosynthetic organisms (Fukuda, Botanical Magazine (Tokyo) 71: 79-86 (1958); Allen, Arch. Mikerobiol.32: 270-277(1959); Ascione, et al., Science 152: 752-754 (1966), all of which are herein incorporated by reference in their entirety). Cyanidium caldarium can grow heterotrophically on glucose or sucrose in the dark or autotrophically in the light, undergoing photosynthesis. In nature the unicellular red algae are found living in habitats of widely varying light intensity.

[0005] The thermophilic characteristics of Cyanidium caldarium has been extensively investigated. It has been found that most Cyanidium caldarium proteins are stable at 55° C. and more heat-stable than proteins from mesophilic algae (Enami, Plant Cell Physiol. 19:869-876 (1978), herein incorporated by reference in its entirety). Ribulose 1,5-bisphosphate carboxylase isolated from Cyanidium caldarium shows the optimum enzyme activity at 45° C., indicating that thermostability is the result of inherent stability of the enzyme molecule (Ford, Biochim. Biophys. Acta. 569:239-248 (1979), herein incorporated by reference in its entirety).

[0006] The unicellular red alga Cyanidium caldarium has a small genome, 13 Mb (Ohta, et al., Plant Cell Physiol. 33: 657-661 (1992), herein incorporated by reference in its entirety). The cells of Cyanidium caldarium contain a nucleus, a mitochondrion, and a chloroplast, each having its own genome. It has been found that the chloroplast trnk gene from Cyanidium caldarium resembles those of higher plants with respect to nucleotide sequeces while the gene resembles those of lower plants with respect to gene structure (Ohta, et al., Plant Cell Physiol. 33:657-661(1972), herein incorporated by reference in its entirety). The nuclear genome of Cyanidium caldarium has two types of differentially photo-regulated nuclear genes that encode σ factors for chloroplast RNA polymerase (Oikawa, et al., Gene 210:277-285 (1998), herein incorporated by reference in its entirety).

### II. Expressed Sequence Tag Nucleic Acid Molecules

[0007] Expressed sequence tags, or ESTs, are short sequences of randomly selected clones from a cDNA (or complementary DNA) library which are representative of the cDNA inserts of these randomly selected clones (McCombie, et al., Nature Genetics, 1:124-130 (1992); Kurata, et al., Nature Genetics, 8: 365-372 (1994); Okubo, et al., Nature Genetics, 2: 173-179 (1992), all of which are herein incorporated by reference in their entirety). The randomly selected clones comprise inserts that can represent a copy of up to the full length of a mRNA transcript.

[0008] Using conventional methodologies, cDNA libraries can be constructed from the mRNA (messenger RNA) of a given tissue or organism using poly dT primers and reverse transcriptase (Efstratiadis, et al., Cell 7:279-288 (1976); Higuchi, et al., Proc. Natl. Acad. Sci. (U.S.A.) 73:3146-3150 (1976); Maniatis, et al., Cell 8:163 (1976); Land, et al., Nucleic Acids Res. 9:2251-2266 (1981); Okayama, et al., Mol. Cell. Biol. 2:161-170 (1982); Gubler, et al., Gene 25:263 (1983), all of which are herein incorporated by reference in their entirety).

[0009] Several methods may be employed to obtain full-length cDNA constructs. For example, terminal transferase can be used to add homopolymeric tails of dC residues to the free 3′ hydroxyl groups (Land, et al., Nucleic Acids Res. 9:2251-2266 (1981), herein incorporated by reference in its entirety). This tail can then be hybridized by a poly dG oligo which can act as a primer for the synthesis of full length second strand cDNA (Okayama and Berg, Mol. Cell Biol. 2:161-170 (1982), herein incorporated by reference in its entirety), report a method for obtaining full length cDNA constructs. This method has been simplified by using synthetic primer-adapters that have both homopolymeric tails for priming the synthesis of the first and second strands and restriction sites for cloning into plasmids (Coleclough, et al., Gene 34:305-314 (1985), herein incorporated by reference in its entirety) and bacteriophage vectors (Krawinkel, et al., Nucleic Acids Res. 14:1913 (1986); Han, et al., Nucleic Acids Res. 15:6304 (1987), all of which are herein incorporated by reference in their entirety).

[0010] These strategies have been coupled with additional strategies for isolating rare mRNA populations. For example, a typical mammalian cell contains between 10,000 and 30,000 different mRNA sequences (Davidson, Gene Activity in Early Development, 2nd ed., Academic Press, New York (1976), herein incorporated by reference in its entirety). The number of clones required to achieve a given probability that a low-abundance mRNA will be present in a cDNA library is N=(ln(1−P))/(ln(1−1/n)) where N is the number of clones required, P is the probability desired, and 1/n is the fractional proportion of the total mRNA that is represented by a single rare mRNA. (Sambrook, et al., Molecular Cloning: A Laboratory Manual, 2nd ed., Cold Spring Harbor Laboratory Press (1989), herein incorporated by reference in its entirety.).

[0011] A method to enrich preparations of mRNA for sequences of interest is to fractionate by size. One such method is to fractionate by electrophoresis through an agarose gel (Pennica, et al., Nature 301:214-221 (1983), herein incorporated by reference in its entirety). Another such method employs sucrose gradient centrifugation in the presence of an agent, such as methylmercuric hydroxide, that denatures secondary structure in RNA (Schweinfest, et al., Proc. Natl. Acad. Sci. (U.S.A.) 79:4997-5000 (1982), herein incorporated by reference in its entirety).

[0012] A frequently adopted method is to construct equalized or normalized cDNA libraries (Ko, Nucleic Acids Res. 18:5705-5711 (1990); Patanjali, S. R. et al., Proc. Natl. Acad. Sci. (U.S.A.) 88:1943-1947 (1991), all of which are herein incorporated by reference in their entirety). Typically, the cDNA population is normalized by subtractive hybridization (Schmid, et al., J. Neurochem. 48:307-312 (1987); Fargnoli, et al., Anal. Biochem. 187:364-373 (1990); Travis, et al., Proc. Natl. Acad. Sci. (U.S.A.) 85:1696-1700 (1988); Kato, Eur. J. Neurosci. 2:704 (1990); and Schweinfest, et al., Genet. Anal. Tech. Appl. 7:64 (1990), all of which are herein incorporated by reference in their entirety). Subtraction represents another method for reducing the population of certain sequences in the cDNA library (Swaroop, et al., Nucleic Acids Res. 19:1954 (1991), herein incorporated by reference in its entirety).

[0013] ESTs can be sequenced by a number of methods. Two basic methods may be used for DNA sequencing, the chain termination method of Sanger et al., Proc. Natl. Acad. Sci. (U.S.A.) 74: 5463-5467 (1977), herein incorporated by reference in its entirety and the chemical degradation method of Maxam and Gilbert, Proc. Nat. Acad. Sci. (U.S.A.) 74: 560-564 (1977), herein incorporated by reference in its entirety. Automation and advances in technology such as the replacement of radioisotopes with fluorescence-based sequencing have reduced the effort required to sequence DNA (Craxton, Methods, 2: 20-26 (1991); Ju et al., Proc. Natl. Acad. Sci. (U.S.A.) 92: 4347-4351 (1995); Tabor and Richardson, Proc. Natl. Acad Sci. (U.S.A.) 92: 6339-6343 (1995), all of which are herein incorporated by reference in their entirety). Automated sequencers are available from, for example, Pharmacia Biotech, Inc., Piscataway, N.J. (Pharmacia ALF), LI-COR, Inc., Lincoln, Neb. (LI-COR 4,000) and Millipore, Bedford, Mass. (Millipore BaseStation).

[0014] In addition, advances in capillary gel electrophoresis have also reduced the effort required to sequence DNA and such advances provide a rapid high resolution approach for sequencing DNA samples (Swerdlow and Gesteland, Nucleic Acids Res. 18:1415-1419 (1990); Smith, Nature 349:812-813 (1991); Luckey et al., Methods Enzymol. 218:154-172 (1993); Lu et al., J. Chromatog. A. 680:497-501 (1994); Carson et al., Anal. Chem. 65:3219-3226 (1993); Huang et al., Anal. Chem. 64:2149-2154 (1992); Kheterpal et al., Electrophoresis 17:1852-1859 (1996); Quesada and Zhang, Electrophoresis 17:1841-1851 (1996); Baba, Yakugaku Zasshi 117:265-281 (1997), all of which are herein incorporated by reference in their entirety).

[0015] ESTs longer than 150 base pairs have been found to be useful for similarity searches and mapping. (Adams, et al., Science 252:1651-1656 (1991), herein incorporated by reference.) ESTs, which can represent copies of up to the full length transcript, may be partially or completely sequenced. Between 150-450 nucleotides of sequence information is usually generated as this is the length of sequence information that is routinely and reliably produced using single run sequence data. Typically, only single run sequence data is obtained from the cDNA library (Adams, et al., Science 252:1651-1656 (1991), herein incorporated by reference in its entirety). Automated single run sequencing typically results in an approximately 2-3% error or base ambiguity rate. (Boguski, et al., Nature Genetics, 4:332-333 (1993), herein incorporated by reference in its entirety).

[0016] EST databases have been constructed or partially constructed from, for example, C. elegans (McCombrie, et al., Nature Genetics 1: 124-131 (1992), herein incorporated by reference in its entirety), human liver cell line HepG2 (Okubo, et al., Nature Genetics 2:173-179 (1992), herein incorporated by reference in its entirety), human brain RNA (Adams, et al., Science 252:1651-1656 (1991); Adams, et al., Nature 355:632-635 (1992), all of which are herein incorporated by reference in their entirety), Arabidopsis, (Newman, et al., Plant Physiol. 106:1241-1255 (1994), herein incorporated by reference in its entirety); and rice (Kurata, et al., Nature Genetics 8:365-372 (1994), herein incorporated by reference in its entirety).

### III. Sequence Comparisons

[0017] A characteristic feature of a DNA sequence is that it can be compared with other known DNA sequences. Sequence comparisons can be undertaken by determining the similarity of the test or query sequence with sequences in publicly available or propriety databases (“similarity analysis”) or by searching for certain motifs (“intrinsic sequence analysis”) (e.g. cis elements) (Coulson, Trends in Biotechnology 12: 76-80 (1994); Birren, et al., Genome Analysis, 1: 543-559 (1997), all of which are herein incorporated by reference in their entirety).

[0018] Similarity analysis includes database search and alignment. Examples of public databases include the DNA Database of Japan (DDBJ) (on the Worldwide web at ddbj.nig.ac jp/); Genebank (on the Worldwide web at ncbi.nlm.nih.gov/web/Genbank/Index.htlm); and the European Molecular Biology Laboratory Nucleic Acid Sequence Database (EMBL) (on the Worldwide web at ebi.ac.uk/ebi_docs/embl_db.html). A number of different search algorithms have been developed, one example of which are the suite of programs referred to as BLAST programs. There are five implementations of BLAST, three designed for nucleotide sequences queries (BLASTN, BLASTX, and TBLASTX) and two designed for protein sequence queries (BLASTP and TBLASTN) (Coulson, Trends in Biotechnology 12: 76-80 (1994); Birren et al., Genome Analysis 1: 543-559 (1997), all of which are herein incorporated by reference in their entirety).

[0019] BLASTN takes a nucleotide sequence (the query sequence) and its reverse complement and searches them against a nucleotide sequence database. BLASTN was designed for speed, not maximum sensitivity, and may not find distantly related coding sequences. BLASTX takes a nucleotide sequence, translates it in three forward reading frames and three reverse complement reading frames, and then compares the six translations against a protein sequence database. BLASTX is useful for sensitive analysis of preliminary (single-pass) sequence data and is tolerant of sequencing errors (Gish and States, Nature Genetics 3: 266-272 (1993), herein incorporated by reference in its entirety). BLASTN and BLASTX may be used in concert for analyzing EST data (Coulson, Trends in Biotechnology 12: 76-80 (1994); Birren et al., Genome Analysis 1: 543-559 (1997), all of which are herein incorporated by reference in their entirety).

[0020] Given a coding nucleotide sequence and the protein it encodes, it is often preferable to use the protein as the query sequence to search a database because of the greatly increased sensitivity to detect more subtle relationships. This is due to the larger alphabet of proteins (20 amino acids) compared with the alphabet of nucleic acid sequences (4 bases), where it is far easier to obtain a match by chance. In addition, with nucleotide alignments, only a match (positive score) or a mismatch (negative score) is obtained, but with proteins, the presence of conservative amino acid substitutions can be taken into account. Here, a mismatch may yield a positive score if the non-identical residue has physical/chemical properties similar to the one it replaced. Various scoring matrices are used to supply the substitution scores of all possible amino acid pairs. A general purpose scoring system is the BLOSUM62 matrix (Henikoff and Henikoff, Proteins 17: 49-61 (1993), herein incorporated by reference in its entirety), which is currently the default choice for BLAST programs. BLOSUM62 is tailored for alignments of moderately diverged sequences and thus may not yield the best results under all conditions (Altschul, J. Mol. Biol. 36: 290-300 (1993), herein incorporated by reference in its entirety), uses a combination of three matrices to cover all contingencies. This may improve sensitivity, but at the expense of slower searches. In practice, a single BLOSUM62 matrix is often used but others (PAM40 and PAM250) may be attempted when additional analysis is necessary. Low PAM matrices are directed at detecting very strong but localized sequence similarities, whereas high PAM matrices are directed at detecting long but weak alignments between very distantly related sequences.

[0021] Homologues in other organisms are available that can be used for comparative sequence analysis. Multiple alignments are performed to study similarities and differences in a group of related sequences. CLUSTAL W is a multiple sequence alignment package available that performs progressive multiple sequence alignments based on the method of Feng and Doolittle, J. Mol. Evol. 25: 351-360 (1987), herein incorporated by reference in its entirety. Each pair of sequences is aligned and the distance between each pair is calculated; from this distance matrix, a guide tree is calculated, and all of the sequences are progressively aligned based on this tree. A feature of the program is its sensitivity to the effect of gaps on the alignment; gap penalties are varied to encourage the insertion of gaps in probable loop regions instead of in the middle of structured regions. Users can specify gap penalties, choose between a number of scoring matrices, or supply their own scoring matrix for both the pairwise alignments and the multiple alignments. CLUSTAL W for UNIX and VMS systems is available at: ftp.ebi.ac.uk. Another program is MACAW (Schuler et al., Proteins, Struct. Func. Genet. 9: 180-190 (1991), herein incorporated by reference in its entirety), for which both Macintosh and Microsoft Windows versions are available. MACAW uses a graphical interface, provides a choice of several alignment algorithms, and is available by anonymous ftp at: ncbi.nlm.nih.gov (directory/pub/macaw).

[0022] Sequence motifs are derived from multiple alignments and can be used to examine individual sequences or an entire database for subtle patterns. With motifs, it is sometimes possible to detect distant relationships that may not be demonstrable based on comparisons of primary sequences alone. Currently, the largest collection of sequence motifs in the world is PROSITE (Bairoch and Bucher, Nucleic Acid Research 22: 3583-3589 (1994), herein incorporated by reference in its entirety). PROSITE may be accessed via either the ExPASy server on the World Wide Web or anonymous ftp site. Many commercial sequence analysis packages also provide search programs that use PROSITE data.

[0023] A resource for searching protein motifs is the BLOCKS E-mail server developed by S. Henikoff (Henikoff, Trends Biochem Sci. 18: 267-268 (1993); Henikoff and Henikoff, Nucleic Acid Research 19: 6565-6572 (1991); Henikoff and Henikoff, Proteins 17: 49-61 (1993), all of which are herein incorporated by reference in their entirety). BLOCKS searches a protein or nucleotide sequence against a database of protein motifs or “blocks.” Blocks are defined as short, ungapped multiple alignments that represent highly conserved protein patterns. The blocks themselves are derived from entries in PROSITE as well as other sources. Either a protein or nucleotide query can be submitted to the BLOCKS server; if a nucleotide sequence is submitted, the sequence is translated in all six reading frames and motifs are sought in these conceptual translations. Once the search is completed, the server will return a ranked list of significant matches, along with an alignment of the query sequence to the matched BLOCKS entries.

[0024] Conserved protein domains can be represented by two-dimensional matrices, which measure either the frequency or probability of the occurrences of each amino acid residue and deletions or insertions in each position of the domain. This type of model, when used to search against protein databases, is sensitive and usually yields more accurate results than simple motif searches. Two popular implementations of this approach are profile searches (such as GCG program ProfileSearch) and Hidden Markov Models (HMMs) (Krough et al., J. Mol. Biol. 235: 1501-1531 (1994); Eddy, Current Opinion in Structural Biology 6: 361-365 (1996), both of which are herein incorporated by reference in their entirety). In both cases, a large number of common protein domains have been converted into profiles, as present in the PROSITE library, or HHM models, as in the Pfam protein domain library (Sonnhammer et al., Proteins 28: 405-420 (1997), herein incorporated by reference in its entirety). Pfam contains more than 500 HMM models for enzymes, transcription factors, signal transduction molecules, and structural proteins. Protein databases can be queried with these profiles or HMM models, which will identify proteins containing the domain of interest. For example, HMMSW or HMMFS, two programs in a public domain package called HMMER (Sonnhammer et al., Proteins 28: 405-420 (1997), herein incorporated by reference in its entirety) can be used.

[0025] PROSITE and BLOCKS represent collected families of protein motifs. Thus, searching these databases entails submitting a single sequence to determine whether or not that sequence is similar to the members of an established family. Programs working in the opposite direction compare a collection of sequences with individual entries in the protein databases. An example of such a program is the Motif Search Tool, or MoST (Tatusov et al., Proc. Natl. Acad. Sci. 91:12091-12095 (1994), herein incorporated by reference in its entirety.) On the basis of an aligned set of input sequences, a weight matrix is calculated by using one of four methods (selected by the user); a weight matrix is simply a representation, position by position in an alignment, of how likely a particular amino acid will appear. The calculated weight matrix is then used to search the databases. To increase sensitivity, newly found sequences are added to the original data set, the weight matrix is recalculated, and the search is performed again. This procedure continues until no new sequences are found.

### SUMMARY OF THE INVENTION

[0026] The present invention provides a substantially purified nucleic acid molecule having a nucleic acid sequence selected from the group consisting of SEQ ID NO: 1 through SEQ ID NO: 5674 or complements thereof.

[0027] The present invention also provides a substantially purified nucleic acid molecule, the nucleic acid molecule capable of specifically hybridizing to a second nucleic acid molecule having a nucleic acid sequence selected from the group consisting of SEQ ID NO: 1 through SEQ ID NO: 5674 or complements thereof.

[0028] The present invention further provides a substantially purified protein, peptide, or fragment thereof encoded by a nucleic acid sequence selected from the group consisting of SEQ ID NO: 1 through SEQ ID NO:5674 or complements thereof.

[0029] The present invention also provides a substantially purified nucleic acid molecule encoding a Cyanidium caldarium protein homologue or fragment thereof, wherein the nucleic acid molecules comprises a nucleic acid sequence selected from the group consisting of SEQ ID NO: 1 through SEQ ID NO: 5674.

[0030] The present invention also provides a transformed cell having a nucleic acid molecule which comprises: (A) an exogenous promoter region which functions in the cell to cause the production of a mRNA molecule; which is linked to (B) a structural nucleic acid molecule, wherein the structural nucleic acid molecule comprises a nucleic acid sequence selected from the group consisting of SEQ ID NO:1 through SEQ ID NO:5674 or complements thereof; which is linked to (C) a 3′ non-translated sequence that functions in the cell to cause termination of transcription and addition of polyadenylated ribonucleotides to a 3′ end of the mRNA molecule.

[0031] The present invention also provides a plant cell, a mammalian cell, a bacterial cell, an insect cell, a fungal cell and an algal cell transformed with a nucleic acid molecule of the present invention.

[0032] The present invention also provides a computer readable medium having recorded thereon one or more of the nucleotide sequences depicted in SEQ ID NO: 1 through SEQ ID NO: 5674 or complements thereof.

### DETAILED DESCRIPTION OF THE INVENTION

### Agents of the Invention:

[0033] (a) Nucleic Acid Molecules

[0034] Agents of the present invention include nucleic acid molecules and more specifically EST nucleic acid molecules or nucleic acid fragment molecules thereof. Fragment EST nucleic acid molecules may encode significant portion(s) of, or indeed most of, the EST nucleic acid molecule. Alternatively, the fragments may comprise smaller oligonucleotides (having from about 15 to about 250 nucleotide residues, and more preferably, about 15 to about 30 nucleotide residues).

[0035] In a preferred embodiment the nucleic acid molecules of the present invention are derived from a unicellular red alga and in an even more preferred embodiment the nucleic acid molecules of the present invention are derived from Cyanidium caldarium.

[0036] The term “substantially purified”, as used herein, refers to a molecule separated from substantially all other molecules normally associated with it in its native state. More preferably a substantially purified molecule is the predominant species present in a preparation. A substantially purified molecule may be greater than 60% free, preferably 75% free, more preferably 90% free, and most preferably 95% free from the other molecules (exclusive of solvent) present in the natural mixture. The term “substantially purified” is not intended to encompass molecules present in their native state.

[0037] The agents of the present invention will preferably be “biologically active” with respect to either a structural attribute, such as the capacity of a nucleic acid to hybridize to another nucleic acid molecule, or the ability of a protein to be bound by antibody (or to compete with another molecule for such binding). Alternatively, such an attribute may be catalytic, and thus involve the capacity of the agent to mediate a chemical reaction or response.

[0038] The agents of the present invention may also be recombinant. As used herein, the term recombinant means any agent (e.g. DNA, peptide etc.), that is, or results, however indirect, from human manipulation of a nucleic acid molecule.

[0039] It is understood that the agents of the present invention may be labeled with reagents that facilitate detection of the agent (e.g. fluorescent labels (Prober, et al., Science 238:336-340 (1987); Albarella et al., EP 144914, chemical labels (Sheldon et al., U.S. Pat. No. 4,582,789; Albarella et al., U.S. Pat. No. 4,563,417, modified bases (Miyoshi et al., EP 119448, all of which are herein incorporated by reference in their entirety).

[0040] It is further understood, that the present invention provides bacterial, viral, microbial, and plant cells comprising the agents of the present invention.

[0041] EST nucleic acid molecules or fragment EST nucleic acid molecules or other nucleic acid molecules of the present invention are capable of specifically hybridizing to other nucleic acid molecules under certain circumstances. As used herein, two nucleic acid molecules are said to be capable of specifically hybridizing to one another if the two molecules are capable of forming an anti-parallel, double-stranded nucleic acid structure. A nucleic acid molecule is said to be the “complement” of another nucleic acid molecule if they exhibit complete complementarity. As used herein, molecules are said to exhibit “complete complementarity” when every nucleotide of one of the molecules is complementary to a nucleotide of the other. Two molecules are said to be “minimally complementary” if they can hybridize to one another with sufficient stability to permit them to remain annealed to one another under at least conventional “low-stringency” conditions. Similarly, the molecules are said to be “complementary” if they can hybridize to one another with sufficient stability to permit them to remain annealed to one another under conventional “high-stringency” conditions. Conventional stringency conditions are described by Sambrook, et al., In: Molecular Cloning, A Laboratory Manual, 2nd Edition, Cold Spring Harbor Press, Cold Spring Harbor, N.Y. (1989), and by Haymes, et al. In: Nucleic Acid Hybridization, A Practical Approach, IRL Press, Washington, D.C. (1985), herein incorporated by reference in its entirety. Departures from complete complementarity are therefore permissible, as long as such departures do not completely preclude the capacity of the molecules to form a double-stranded structure. Thus, in order for an EST nucleic acid molecule or fragment EST nucleic acid molecule to serve as a primer or probe it need only be sufficiently complementary in sequence to be able to form a stable double-stranded structure under the particular solvent and salt concentrations employed.

[0042] Appropriate stringency conditions which promote DNA hybridization are, for example, 6.0×sodium chloride/sodium citrate (SSC) at about 45° C., followed by a wash of 2.0×SSC at 50° C., are known to those skilled in the art or can be found in Current Protocols in Molecular Biology, John Wiley & Sons, N.Y. (1989), 6.3.1-6.3.6. For example, the salt concentration in the wash step can be selected from a low stringency of about 2.0×SSC at 50° C. to a high stringency of about 0.2×SSC at 50° C. In addition the temperature in the wash step can be increased from low stringency conditions at room temperature, about 22° C., to high stringency conditions at about 65° C. Both temperature and salt may be varied, or either the temperature or the salt concentration may be held constant while the other variable is changed.

[0043] In a preferred embodiment, a nucleic acid of the present invention will specifically hybridize to one or more of the nucleic acid molecules set forth in SEQ ID NO: 1 through SEQ ID NO: 5674 or complements thereof under moderately stringent conditions, for example at about 2.0×SSC and about 65° C.

[0044] In a particularly preferred embodiment, a nucleic acid of the present invention will include those nucleic acid molecules that specifically hybridize to one or more of the nucleic acid molecules set forth in SEQ ID NO:1 through SEQ ID NO: 5674 or complements thereof under high stringency conditions.

[0045] In one aspect of the present invention, the nucleic acid molecules of the present invention have one or more of the nucleic acid sequences set forth in SEQ ID NO: 1 through to SEQ ID NO:5674 or complements thereof. In another aspect of the present invention, one or more of the nucleic acid molecules of the present invention share between 100% and 90% sequence identity with one or more of the nucleic acid sequences set forth in SEQ ID NO: 1 through to SEQ ID NO:5674 or complements thereof. In a further aspect of the present invention, one or more of the nucleic acid molecules of the present invention share between 100% and 95% sequence identity with one or more of the nucleic acid sequences set forth in SEQ ID NO: 1 through to SEQ ID NO:5674 or complements thereof. In a more preferred aspect of the present invention, one or more of the nucleic acid molecules of the present invention share between 100% and 98% sequence identity with one or more of the nucleic acid sequences set forth in SEQ ID NO: 1 through to SEQ ID NO:5674 or complements thereof. In an even more preferred aspect of the present invention, one or more of the nucleic acid molecules of the present invention share between 100% and 99% sequence identity with one or more of the sequences set forth in SEQ ID NO: 1 through to SEQ ID NO:5674 or complements thereof. In a further, even more preferred aspect of the present invention, one or more of the nucleic acid molecules of the present invention exhibit 100% sequence identity with one or more nucleic acid molecules present within the cDNA library LIB 190, herein designated (Monsanto Company, St. Louis, Mo., United States of America).

[0046] The degeneracy of the genetic code, which allows different nucleic acid sequences to code for the same protein or peptide, is known in the literature. (U.S. Pat. No. 4,757,006, herein incorporated by reference in its entirety). As used herein a nucleic acid molecule is degenerate of another nucleic acid molecule when the nucleic acid molecules encode for the same amino acid sequences but comprise different nucleotide sequences. An aspect of the present invention is that the nucleic acid molecules of the present invention include nucleic acid molecules that are degenerate of those set forth in SEQ ID NO: 1 through to SEQ ID NO:5674 or complements thereof.

[0047] (b) Protein and Peptide Molecules A class of agents comprises one or more of the protein or peptide molecules encoded by SEQ ID NO: 1 through SEQ ID NO:5674 or one or more of the protein or fragment thereof or peptide molecules encoded by other nucleic acid agents of the present invention. Protein and peptide molecules can be identified using known protein or peptide molecules as a target sequence or target motif in the BLAST programs of the present invention. In a preferred embodiment the protein or fragment molecules of the present invention are derived from Cyanidium caldarium. As used herein, the term “protein molecule” or “peptide molecule” includes any molecule that comprises five or more amino acids. It is well known in the art that proteins may undergo modification, including post-translational modifications, such as, but not limited to, disulfide bond formation, glycosylation, phosphorylation, or oligomerization. Thus, as used herein, the term “protein molecule” or “peptide molecule” includes any protein molecule that is modified by any biological or non-biological process. The terms “amino acid” and “amino acids” refer to all naturally occurring L-amino acids. This definition is meant to include norleucine, omithine, homocysteine, and homoserine.

[0048] One or more of the protein or fragment of peptide molecules may be produced via chemical synthesis, or more preferably, by expressing in a suitable bacterial or eukaryotic host. Suitable methods for expression are described by Sambrook, et al., (In: Molecular Cloning, A Laboratory Manual, 2nd Edition, Cold Spring Harbor Press, Cold Spring Harbor, N.Y. (1989), herein incorporated by reference in its entirety), or similar texts.

[0049] A “protein fragment” is a peptide or polypeptide molecule whose amino acid sequence comprises a subset of the amino acid sequence of that protein. A protein or fragment thereof that comprises one or more additional peptide regions not derived from that protein is a “fusion” protein. Such molecules may be derivatized to contain carbohydrate or other moieties (such as keyhole limpet hemocyanin, etc.). Fusion protein or peptide molecule of the present invention are preferably produced via recombinant means.

[0050] Another class of agents comprise protein or peptide molecules encoded by SEQ ID NO: 1 through SEQ ID NO:5674 or, fragments or fusions thereof in which non-essential, or not relevant, amino acid residues have been added, replaced, or deleted. An example of such a homologue is the homologue protein of a plant, including but not limited to soybean, alfalfa, Arabidopsis, barley, cotton, corn, oat, oilseed rape, rice, canola, maize, ornamentals, sugarcane, sugarbeet, tomato, potato, wheat, and turf grasses. Such a homologue can be obtained by any of a variety of methods. Most preferably, as indicated above, one or more of the disclosed sequences (e.g., SEQ ID NO: 1 through SEQ ID NO:5674 or complements thereof) will be used to define a pair of primers that may be used to isolate the homologue-encoding nucleic acid molecules from any desired species. Such molecules can be expressed to yield homologues by recombinant means.

[0051] In a preferred embodiment of the present invention, a Cyanidium caldarium protein or fragment thereof of the present invention is a homologue of another algal protein. In another preferred embodiment of the present invention, a Cyanidium caldarium protein or fragment thereof of the present invention is a homologue of a fungal protein. In another preferred embodiment of the present invention, a Cyanidium caldarium protein or fragment thereof of the present invention is a homologue of mammalian protein. In another preferred embodiment of the present invention, a Cyanidium caldarium protein or fragment thereof of the present invention is a homologue of a bacterial protein.

[0052] In a preferred embodiment of the present invention, the nucleic molecule of the present invention encodes a Cyanidium caldarium protein or fragment thereof where a Cyanidium caldarium protein or fragment thereof exhibits a BLAST probability score of greater than 1E-12, preferably a BLAST probability score of between about 1E-30 and about 1E-12, even more preferably a BLAST probability score of greater than 1E-30 with its homologue.

[0053] In another preferred embodiment of the present invention, the nucleic acid molecule encoding a Cyanidium caldarium protein or fragment thereof exhibits a % identity with its homologue of between about 25% and about 40%, more preferably of between about 40 and about 70%, even more preferably of between about 70% and about 90% and even more preferably between about 90% and 99%. In another preferred embodiment, of the present invention, a Cyanidium caldarium protein or fragment thereof exhibits a % identity with its homologue of 100%.

[0054] In a preferred embodiment of the present invention, the nucleic molecule of the present invention encodes a Cyanidium caldarium protein or fragment thereof where the Cyanidium caldarium protein exhibits a BLAST score of greater than 120, preferably a BLAST score of between about 1450 and about 120, even more preferably a BLAST score of greater than 1450 with its homologue.

[0055] The degeneracy of the genetic code, which allows different nucleic acid sequences to code for the same protein or peptide, is known in the literature. (U.S. Pat. No. 4,757,006, herein incorporated by reference in its entirety). As used herein a nucleic acid molecule is degenerate of another nucleic acid molecule when the nucleic acid molecules encode for the same amino acid sequences but comprise different nucleotide sequences.

[0056] In an aspect of the present invention, one or more of the nucleic acid molecules of the present invention differ in nucleic acid sequence from those encoding a Cyanidium caldarium protein or fragment thereof in SEQ ID NO: 1 through SEQ ID NO: 5674 due to the degeneracy in the genetic code in that they encode the same protein but differ in nucleic acid sequence.

[0057] In another further aspect of the present invention, nucleic acid molecules of the present invention can comprise sequences, which differ from those encoding a protein or fragment thereof in SEQ ID NO: 1 through SEQ ID NO: 5674 due to fact that the different nucleic acid sequence encodes a protein having one or more conservative amino acid changes. It is understood that codons capable of coding for such conservative amino acid substitutions are known in the art.

[0058] It is well known in the art that one or more amino acids in a native sequence can be substituted with another amino acid(s), the charge and polarity of which are similar to that of the native amino acid, i.e., a conservative amino acid substitution, resulting in a silent change. Conserved substitutes for an amino acid within the native polypeptide sequence can be selected from other members of the class to which the naturally occurring amino acid belongs. Amino acids can be divided into the following four groups: (1) acidic amino acids, (2) basic amino acids, (3) neutral polar amino acids, and (4) neutral nonpolar amino acids. Representative amino acids within these various groups include, but are not limited to, (1) acidic (negatively charged) amino acids such as aspartic acid and glutamic acid; (2) basic (positively charged) amino acids such as arginine, histidine, and lysine; (3) neutral polar amino acids such as glycine, serine, threonine, cysteine, cystine, tyrosine, asparagine, and glutamine; and (4) neutral nonpolar (hydrophobic) amino acids such as alanine, leucine, isoleucine, valine, proline, phenylalanine, tryptophan, and methionine.

[0059] Conservative amino acid changes within the native polypeptides sequence can be made by substituting one amino acid within one of these groups with another amino acid within the same group. Biologically functional equivalents of the proteins or fragments thereof of the present invention can have 10 or fewer conservative amino acid changes, more preferably seven or fewer conservative amino acid changes, and most preferably five or fewer conservative amino acid changes. The encoding nucleotide sequence will thus have corresponding base substitutions, permitting it to encode biologically functional equivalent forms of the proteins or fragments of the present invention.

[0060] It is understood that certain amino acids may be substituted for other amino acids in a protein structure without appreciable loss of interactive binding capacity with structures such as, for example, antigent-binding regions of antibodies or binding sites on substrate molecules. Because it is the interactive capacity and nature of a protein that defines that protein's biological functional activity, certain amino acid sequence substitutions can be made in a protein sequence and, of course, its underlying DNA coding sequence and, nevertheless, obtain a protein with like properties. It is thus contemplated by the inventors that various changes may be made in the peptide sequences of the proteins or fragments of the present invention, or corresponding DNA sequences that encode said peptides, without appreciable loss of their biological utility or activity. It is understood that codons capable of coding for such amino acid changes are known in the art.

[0061] In making such changes, the hydropathic index of amino acids may be considered. The importance of the hydropathic amino acid index in conferring interactive biological function on a protein is generally understood in the art (Kyte and Doolittle, J. Mol. Biol. 157, 105-132 (1982), herein incorporated by reference in its entirety). It is accepted that the relative hydropathic character of the amino acid contributes to the secondary structure of the resultant protein, which in turn defines the interaction of the protein with other molecules, for example, enzymes, substrates, receptors, DNA, antibodies, antigens, and the like.

[0062] Each amino acid has been assigned a hydropathic index on the basis of its hydrophobicity and charge characteristics (Kyte and Doolittle, 1982); these are isoleucine (+4.5), valine (+4.2), leucine (+3.8), phenylalanine (+2.8), cysteine/cystine (+2.5), methionine (+1.9), alanine (+1.8), glycine (−0.4), threonine (−0.7), serine (−0.8), tryptophan (−0.9), tyrosine (−1.3), proline (−1.6), histidine (−3.2), glutamate (−3.5), glutamine (−3.5), aspartate (−3.5), asparagine (−3.5), lysine (−3.9), and arginine (−4.5).

[0063] In making such changes, the substitution of amino acids whose hydropathic indices are within ±2 is preferred, those which are within ±1 are particularly preferred, and those within ±0.5 are even more particularly preferred.

[0064] It is also understood in the art that the substitution of like amino acids can be made effectively on the basis of hydrophilicity. U.S. Pat. No. 4,554,101, incorporated herein by reference in its entirety, states that the greatest local average hydrophilicity of a protein, as govern by the hydrophilicity of its adjacent amino acids, correlates with a biological property of the protein.

[0065] As detailed in U.S. Pat. No. 4,554,101, the following hydrophilicity values have been assigned to amino acid residues: arginine (+3.0), lysine (+3.0), aspartate (+3.0±1), glutamate (+3.0±1), serine (+0.3), asparagine (+0.2), glutamine (+0.2), glycine (0), threonine (−0.4), proline (−0.5±1), alanine (−0.5), histidine (−0.5), cysteine (−1.0), methionine (−1.3), valine (−1.5), leucine (−1.8), isoleucine (−1.8), tyrosine (−2.3), phenylalanine (−2.5), and tryptophan (−3.4).

[0066] In making such changes, the substitution of amino acids whose hydrophilicity values are within ±2 is preferred, those which are within ±1 are particularly preferred, and those within ±0.5 are even more particularly preferred.

[0067] In a further aspect of the present invention, one or more of the nucleic acid molecules of the present invention differ in nucleic acid sequence from those encoding a Cyanidium caldarium protein or fragment thereof set forth in SEQ ID NO: 1 through SEQ ID NO: 5674 or fragment thereof due to the fact that one or more codons encoding an amino acid has been substituted for a codon that encodes a nonessential substitution of the amino acid originally encoded.

[0068] (c) Antibodies

[0069] One aspect of the present invention concerns antibodies, single-chain antigen binding molecules, or other proteins that specifically bind to one or more of the protein or peptide molecules of the present invention and their homologues, fusions or fragments. Such antibodies may be used to quantitatively or qualitatively detect the protein or peptide molecules of the present invention. As used herein, an antibody or peptide is said to “specifically bind” to a protein or peptide molecule of the present invention if such binding is not competitively inhibited by the presence of non-related molecules. In a preferred embodiment the antibodies of the present invention bind to proteins of the present invention. In a more preferred embodiment the antibodies of the present invention bind to proteins derived from Cyanidium caldarium.

[0070] Nucleic acid molecules that encode all or part of the protein of the present invention can be expressed, via recombinant means, to yield protein or peptides that can in turn be used to elicit antibodies that are capable of binding the expressed protein or peptide. Such antibodies may be used in immunoassays for that protein. Such protein-encoding molecules, or their fragments may be a “fusion” molecule (i.e., a part of a larger nucleic acid molecule) such that, upon expression, a fusion protein is produced. It is understood that any of the nucleic acid molecules of the present invention may be expressed, via recombinant means, to yield proteins or peptides encoded by these nucleic acid molecules.

[0071] The antibodies that specifically bind proteins and protein fragments of the present invention may be polyclonal or monoclonal, and may comprise intact immunoglobulins, or antigen binding portions of immunoglobulins (such as (F(ab′), F(ab′)₂) fragments, or single-chain immunoglobulins producible, for example, via recombinant means). It is understood that practitioners are familiar with the standard resource materials which describe specific conditions and procedures for the construction, manipulation and isolation of antibodies (see, for example, Harlow and Lane, In Antibodies: A Laboratory Manual, Cold Spring Harbor Press, Cold Spring Harbor, N.Y. (1988), herein incorporated by reference in its entirety).

[0072] Murine monoclonal antibodies are particularly preferred. BALB/c mice are preferred for this purpose, however, equivalent strains may also be used. The animals are preferably immunized with approximately 25 μg of purified protein (or fragment thereof) that has been emulsified a suitable adjuvant (such as TiterMax adjuvant (Vaxcel, Norcross, Ga.)). Immunization is preferably conducted at two intramuscular sites, one intraperitoneal site, and one subcutaneous site at the base of the tail. An additional i.v. injection of approximately 25 μg of antigen is preferably given in normal saline three weeks later. After approximately 11 days following the second injection, the mice may be bled and the blood screened for the presence of anti-protein or peptide antibodies. Preferably, a direct binding Enzyme-Linked Immunoassay (ELISA) is employed for this purpose.

[0073] More preferably, the mouse having the highest antibody titer is given a third i.v. injection of approximately 25 μg of the same protein or fragment. The splenic leukocytes from this animal may be recovered 3 days later, and are then permitted to fuse, most preferably, using polyethylene glycol, with cells of a suitable myeloma cell line (such as, for example, the P3X63Ag8.653 myeloma cell line). Hybridoma cells are selected by culturing the cells under “HAT” (hypoxanthine-aminopterin-thymine) selection for about one week. The resulting clones may then be screened for their capacity to produce monoclonal antibodies (“mAbs), preferably by direct ELISA.

[0074] In one embodiment, anti-protein or peptide monoclonal antibodies are isolated using a fusion of a protein, protein fragment, or peptide of the present invention, or conjugate of a protein, protein fragment, or peptide of the present invention, as immunogens. Thus, for example, a group of mice can be immunized using a fusion protein emulsified in Freund's complete adjuvant (e.g. approximately 50 μg of antigen per immunization). At three week intervals, an identical amount of antigen is emulsified in Freund's incomplete adjuvant and used to immunize the animals. Ten days following the third immunization, serum samples are taken and evaluated for the presence of antibody. If antibody titers are too low, a fourth booster can be employed. Polysera capable of binding the protein or peptide can also be obtained using this method.

[0075] In a preferred procedure for obtaining monoclonal antibodies, the spleens of the above-described immunized mice are removed, disrupted, and immune splenocytes are isolated over a ficoll gradient. The isolated splenocytes are fused, using polyethylene glycol with BALB/c-derived HGPRT (hypoxanthine guanine phosphoribosyl transferase) deficient P3x63xAg8.653 plasmacytoma cells. The fused cells are plated into 96-well microtiter plates and screened for hybridoma fusion cells by their capacity to grow in culture medium supplemented with hypothanthine, aminopterin and thymidine for approximately 2-3 weeks.

[0076] Hybridoma cells that arise from such incubation are preferably screened for their capacity to produce an immunoglobulin that binds to a protein of interest. An indirect ELISA may be used for this purpose. In brief, the supernatants of hybridomas are incubated in microtiter wells that contain immobilized protein. After washing, the titer of bound immunoglobulin can be determined using, for example, a goat anti-mouse antibody conjugated to horseradish peroxidase. After additional washing, the amount of immobilized enzyme is determined (for example through the use of a chromogenic substrate). Such screening is performed as quickly as possible after the identification of the hybridoma in order to ensure that a desired clone is not overgrown by non-secreting neighbors. Desirably, the fusion plates are screened several times since the rates of hybridoma growth vary. In a preferred sub-embodiment, a different antigenic form of immunogen may be used to screen the hybridoma. Thus, for example, the splenocytes may be immunized with one immunogen, but the resulting hybridomas can be screened using a different immunogen. It is understood that any of the protein or peptide molecules of the present invention may be used to raise antibodies.

[0077] As discussed below, such antibody molecules or their fragments may be used for diagnostic purposes. Where the antibodies are intended for diagnostic purposes, it may be desirable to derivatize them, for example with a ligand group (such as biotin) or a detectable marker group (such as a fluorescent group, a radioisotope or an enzyme).

[0078] The ability to produce antibodies that bind the protein or peptide molecules of the present invention permits the identification of mimetic compounds of those molecules. A “mimetic compound” is a compound that is not that compound, or a fragment of that compound, but which nonetheless exhibits an ability to specifically bind to antibodies directed against that compound.

[0079] It is understood that any of the agents of the present invention can be substantially purified and/or be biologically active and/or recombinant.

[0080] (d) Algal Constructs and Algal Transformants

[0081] The present invention also relates to an algal recombinant vector comprising exogenous genetic material. The present invention also relates to an algal cell comprising an algal recombinant vector. The present invention also relates to methods for obtaining a recombinant algal host cell comprising introducing into an algal host cell exogenous genetic material.

[0082] Exogenous genetic material is any genetic material, whether naturally occurring or otherwise, from any source that is capable of being inserted into any organism. Exogenous genetic material may be transferred into an algal cell. In a preferred embodiment the exogenous genetic material includes a nucleic acid molecule having a sequence selected from the group consisting of SEQ ID NO: 1 through SEQ ID NO: 5674 or complements thereof.

[0083] The algal recombinant vector may be any vector which can be conveniently subjected to recombinant DNA procedures. The choice of a vector will typically depend on the compatibility of the vector with the algal host cell into which the vector is to be introduced. The vector may be a linear or a closed circular plasmid. The vector system may be a single vector or plasmid or two or more vectors or plasmids which together contain the total DNA to be introduced into the genome of the algal host.

[0084] The algal vector may be an autonomously replicating vector, i.e., a vector which exists as an extrachromosomal entity, the replication of which is independent of chromosomal replication, e.g., a plasmid, an extrachromosomal element, a minichromosome, or an artificial chromosome. The vector may contain any means for assuring self-replication. Alternatively, the vector may be one which, when introduced into the algal cell, is integrated into the genome and replicated together with the chromosome(s) into which it has been integrated. For integration, the vector may rely on the nucleic acid sequence of the vector for stable integration of the vector into the genome by homologous or nonhomologous recombination. Alternatively, the vector may contain additional nucleic acid sequences for directing integration by homologous recombination into the genome of the algal host. The additional nucleic acid sequences enable the vector to be integrated into the host cell genome at a precise location(s) in the chromosome(s). To increase the likelihood of integration at a precise location, there should be preferably two nucleic acid sequences which individually contain a sufficient number of nucleic acids, preferably 400 bp to 1500 bp, more preferably 800 bp to 1000 bp, which are highly homologous with the corresponding target sequence to enhance the probability of homologous recombination. These nucleic acid sequences may be any sequence that is homologous with a target sequence in the genome of the algal host cell, and, furthermore, may be non-encoding or encoding sequences.

[0085] The vectors of the present invention preferably contain one or more selectable markers which permit easy selection of transformed cells. A selectable marker is a gene, the product of which confers upon an algal cell resistance to a compound to which the algal would otherwise be sensitive. The compound can be selected from the group consisting of antibiotics, fungicides, herbicides, and heavy metals. The selectable marker may be selected from any known or subsequently identified selectable markers, including markers derived from algal, fungal, and baterial sources. Preferred selectable markers can be selected from the group including, but not limited to, amdS (acetamidase), argB (ornithine carbamoyltransferase), bar (phosphinothricin acetyltransferase), ble (bleomycin binding protein), cat (chloramphenicol acetyltransferase), hygB (hygromycin B phosphotransferase), nat (nourseothricin acetyltransferase), niaD (nitrate reductase), neo (neomycin phosphotransferase), pac (puromycin acetyltransferase), pyrG (orotidine-5′-phosphate decarboxylase), sat (streptothricin acetyltransferase), sC (sulfate adenyltransferase), trpC (anthranilate synthase), and glyphosate resistant EPSPS genes. Furthermore, selection may be accomplished by co-transformation, e.g., as described in WO 91/17243, herein incorporated by reference in its entirety.

[0086] A nucleic acid sequence of the present invention may be operably linked to a suitable promoter sequence. The promoter sequence is a nucleic acid sequence which is recognized by the algal host cell for expression of the nucleic acid sequence. The promoter sequence contains transcription and translation control sequences which mediate the expression of the protein or fragment thereof.

[0087] A promoter may be any nucleic acid sequence which shows transcriptional activity in the algal host cell of choice and may be obtained from genes encoding polypeptides either homologous or heterologous to the host cell. Examples of suitable promoters for directing the transcription of a nucleic acid construct of the invention in an algal host are light harvesting protein promoters obtained from photosynthetic organisms, Chlorella virus methyltransferase promoters, CaMV 35 S promoter, PL promoter from bacteriophage λ, nopaline synthase promoter from the Ti plasmid of Agrobacterium tumefaciens, and bacterial .trp promotor.

[0088] A protein or fragment thereof encoding nucleic acid molecule of the present invention may also be operably linked to a terminator sequence at its 3′ terminus. The terminator sequence may be native to the nucleic acid sequence encoding the protein or fragment thereof or may be obtained from foreign sources. Any terminator which is functional in the algal host cell of choice may be used in the present invention.

[0089] A protein or fragment thereof encoding nucleic acid molecule of the present invention may also be operably linked to a suitable leader sequence. A leader sequence is a nontranslated region of a mRNA which is important for translation by the algal host. The leader sequence is operably linked to the 5′ terminus of the nucleic acid sequence encoding the protein or fragment thereof. The leader sequence may be native to the nucleic acid sequence encoding the protein or fragment thereof or may be obtained from foreign sources. Any leader sequence which is functional in the algal host cell of choice may be used in the present invention.

[0090] A polyadenylation sequence may also be operably linked to the 3′ terminus of the nucleic acid sequence of the present invention. The polyadenylation sequence is a sequence which when transcribed is recognized by the algal host to add polyadenosine residues to transcribed mRNA. The polyadenylation sequence may be native to the nucleic acid sequence encoding the protein or fragment thereof or may be obtained from foreign sources. Any polyadenylation sequence which is functional in the algal host of choice may be used in the present invention.

[0091] To avoid the necessity of disrupting the cell to obtain the protein or fragment thereof, and to minimize the amount of possible degradation of the expressed protein or fragment thereof within the cell, it is preferred that expression of the protein or fragment thereof gives rise to a product secreted outside the cell. To this end, the protein or fragment thereof of the present invention may be linked to a signal peptide linked to the amino terminus of the protein or fragment thereof. A signal peptide is an amino acid sequence which permits the secretion of the protein or fragment thereof from the algal host into the culture medium. The signal peptide may be native to the protein or fragment thereof of the invention or may be obtained from foreign sources. The 5′ end of the coding sequence of the nucleic acid sequence of the present invention may inherently contain a signal peptide coding region naturally linked in translation reading frame with the segment of the coding region which encodes the secreted protein or fragment thereof. Alternatively, the 5′ end of the coding sequence may contain a signal peptide coding region which is foreign to that portion of the coding sequence which encodes the secreted protein or fragment thereof. The foreign signal peptide may be required where the coding sequence does not normally contain a signal peptide coding region. Alternatively, the foreign signal peptide may simply replace the natural signal peptide to obtain enhanced secretion of the desired protein or fragment thereof. Any signal peptide capable of permitting secretion of the protein or fragment thereof in an algal host of choice may be used in the present invention.

[0092] A protein or fragment thereof encoding nucleic acid molecule of the present invention may also be linked to a propeptide coding region. A propeptide is an amino acid sequence found at the amino terminus of aproprotein or proenzyme. Cleavage of the propeptide from the proprotein yields a mature biochemically active protein. The resulting polypeptide is known as a propolypeptide or proenzyme (or a zymogen in some cases). Propolypeptides are generally inactive and can be converted to mature active polypeptides by catalytic or autocatalytic cleavage of the propeptide from the propolypeptide or proenzyme. The propeptide coding region may be native to the protein or fragment thereof or may be obtained from foreign sources. The foreign propeptide coding region may be obtained from the Saccharomyces cerevisiae alpha-factor gene or Myceliophthora thermophila laccase gene (WO 95/33836, herein incorporated by reference in its entirety).

[0093] The procedures used to ligate the elements described above to construct the recombinant expression vector of the present invention are well known to one skilled in the art (see, for example, Sambrook, 2nd ed., et al., Molecular Cloning, A Laboratory Manual Cold Spring Harbor, N. Y, (1989), herein incorporated by reference in its entirety).

[0094] The present invention also relates to recombinant algal host cells produced by the methods of the present invention which are advantageously used with the recombinant vector of the present invention. The cell is preferably transformed with a vector comprising a nucleic acid sequence of the invention followed by integration of the vector into the host chromosome. The choice of algal host cells will to a large extent depend upon the gene encoding the protein or fragment thereof and its source.

[0095] Algal cells may be transformed by a variety of known techniques, including but not limit to, microprojectile bombardment, protoplast fusion, electroporation, microinjection, and vigorous agitation in the presence of glass beads. Suitable procedures for transformation of green algal host cells are described in EP 108 580, herein incorporated by reference in its entirety. A suitable method of transforming Chlorella species is described by Jarvis and Brown, Curr. Genet. 19: 317-321 (1991), herein incorporated by reference in its entirety. A suitable method of transforming cells of diatom Phaeodactylum tricornutum species is described in WO 97/39106, herein incorporated by reference in its entirety. Chlorophyll C-containing algae may be transformed using the procedures described in U.S. Pat. No. 5,661,017, herein incorporated by reference in its entirety.

[0096] The expressed protein or fragment thereof may be detected using methods known in the art that are specific for the particular protein or fragment. These detection methods may include the use of specific antibodies, formation of an enzyme product, or disappearance of an enzyme substrate. For example, if the protein or fragment thereof has enzymatic activity, an enzyme assay may be used. Alternatively, if polyclonal or monoclonal antibodies specific to the protein or fragment thereof are available, immunoassays may be employed using the antibodies to the protein or fragment thereof. The techniques of enzyme assay and immunoassay are well known to those skilled in the art.

[0097] The resulting protein or fragment thereof may be recovered by methods known in the arts. For example, the protein or fragment thereof may be recovered from the nutrient medium by conventional procedures including, but not limited to, centrifugation, filtration, extraction, spray-drying, evaporation, or precipitation. The recovered protein or fragment thereof may then be further purified by a variety of chromatographic procedures, e.g., ion exchange chromatography, gel filtration chromatography, affinity chromatography, or the like.

[0098] (e) Plant Constructs and Plant Transformants

[0099] Nucleic acid molecules of the present invention may be used in plant transformation or transfection. Exogenous genetic material may be transferred into a plant cell and the plant cell regenerated into a whole, fertile or sterile plant. Exogenous genetic material is any genetic material, whether naturally occurring or otherwise, from any source that is capable of being inserted into any organism. Such genetic material may be transferred into either monocotyledons and dicotyledons including but not limited to the plants, alfalfa, Arabidopsis, barley, Brassica, broccoli, cabbage, citrus, cotton, garlic, oat, oilseed rape, onion, canola, flax, maize, an ornamental plant, pea, peanut, pepper, potato, rice, rye, sorghum, soybean, strawberry, sugarcane, sugarbeet, tomato, wheat, poplar, pine, fir, eucalyptus, apple, lettuce, lentils, grape, banana, tea, turf grasses, sunflower, oil palm, Phaseolus etc. Particularly preferred plants to use for the transformation or transfection would include Arabidopsis, barley, cotton, oat, oilseed rape, rice, maize, soybean, canola, ornamentals, sugarcane, sugarbeet, tomato, potato, wheat and turf grasses (See specifically, Chistou, Particle Bombardment for Genetic Engineering of Plants, Biotechnology Intelligence Unit, Academic Press, San Diego, Calif. (1996), herein incorporated by reference in its entirety).

[0100] Transfer of a nucleic acid that encodes for a protein can result in overexpression of that protein in a transformed cell or transgenic plant. One or more of the proteins or fragments thereof encoded by nucleic acid molecules of the present invention may be overexpressed in a transformed cell or transformed plant. Such overexpression may be the result of transient or stable transfer of the exogenous material. In a preferred embodiment of the present invention, one or more of the Cyanidium caldarium homologue proteins or fragments is overexpressed in a transformed cell or transgenic plant.

[0101] Exogenous genetic material may be transferred into a plant cell by the use of a DNA vector or construct designed for such a purpose. Vectors have been engineered for transformation of large DNA inserts into plant genomes. Binary bacterial artificial chromosomes have been designed to replicate in both E. coli and A. tumefaciens and have all of the features required for transferring large inserts of DNA into plant chromosomes (Choi and Wing, on the website genome.clemson.edu/protocols2-nj.html July, 1998). ApBACwich system has been developed to achieve site-directed integration of DNA into the genome. A 150 kb cotton BAC DNA is reported to have been transferred into a specific lox site in tobacco by biolistic bombardment and Cre-lox site specific recombination.

[0102] A construct or vector may also include a plant promoter to express the protein or protein fragment of choice. A number of promoters which are active in plant cells have been described in the literature. These include the nopaline synthase (NOS) promoter (Ebert et al., Proc. Natl. Acad. Sci. U.S.A. 84: 5745-5749 (1987), herein incorporated by reference in its entirety), the octopine synthase (OCS) promoter (which are carried on tumor-inducing plasmids of Agrobacterium tumefaciens), the caulimovirus promoters such as the cauliflower mosaic virus (CaMV) 19S promoter (Lawton et al., Plant Mol. Biol. 9:3 15-324 (1987), herein incorporated by reference in its entirety) and the CAMV 35S promoter (Odell et al., Nature 313: 810-812 (1985), herein incorporated by reference in its entirety), the figwort mosaic virus 35S-promoter, the light-inducible promoter from the small subunit of ribulose-1,5-bis-phosphate carboxylase (ssRUBISCO), the Adh promoter (Walker et al., Proc. Natl. Acad. Sci. U.S.A. 84: 6624-6628 (1987), herein incorporated by reference in its entirety), the sucrose synthase promoter (Yang et al., Proc. Natl. Acad. Sci. U.S.A. 87: 4144-4148 (1990), herein incorporated by reference in its entirety), the R gene complex promoter (Chandler et al., The Plant Cell 1: 1175-1183 (1989), herein incorporated by reference in its entirety), and the chlorophyll a/b binding protein gene promoter, etc. These promoters have been used to create DNA constructs which have been expressed in plants; see, e.g., PCT publication WO 84/02913, herein incorporated by reference in its entirety.

[0103] Promoters which are known or are found to cause transcription of DNA in plant cells can be used in the present invention. Such promoters may be obtained from a variety of sources such as plants and plant viruses. It is preferred that the particular promoter selected should be capable of causing sufficient expression to result in the production of an effective amount of protein to cause the desired phenotype. In addition to promoters which are known to cause transcription of DNA in plant cells, other promoters may be identified for use in the current invention by screening a plant cDNA library for genes which are selectively or preferably expressed in the target tissues or cells.

[0104] For the purpose of expression in source tissues of the plant, such as the leaf, seed, root or stem, it is preferred that the promoters utilized in the present invention have relatively high expression in these specific tissues. For this purpose, one may choose from a number of promoters for genes with tissue- or cell-specific or -enhanced expression. Examples of such promoters reported in the literature include the chloroplast glutamine synthetase GS2 promoter from pea (Edwards et al., Proc. Natl. Acad. Sci. U.S.A. 87: 3459-3463 (1990), herein incorporated by reference in its entirety), the chloroplast fructose-1,6-biphosphatase (FBPase) promoter from wheat (Lloyd et al., Mol. Gen. Genet. 225: 209-216 (1991), herein incorporated by reference in its entirety), the nuclear photosynthetic ST-LS1 promoter from potato (Stockhaus et al., EMBO J. 8: 2445-2451 (1989), herein incorporated by reference in its entirety), the phenylalanine ammonia-lyase (PAL) promoter and the chalcone synthase (CHS) promoter from Arabidopsis thaliana. Also reported to be active in photosynthetically active tissues are the ribulose-1,5-bisphosphate carboxylase (RbcS) promoter from eastern larch (Larix laricina), the promoter for the cab gene, cab6, from pine (Yamamoto et al., Plant Cell Physiol. 35: 773-778 (1994), herein incorporated by reference in its entirety), the promoter for the Cab-1 gene from wheat (Fejes et al., Plant Mol. Biol. 15: 921-932 (1990), herein incorporated by reference in its entirety), the promoter for the CAB-1 gene from spinach (Lubberstedt et al., Plant Physiol. 104: 97-1006 (1994), herein incorporated by reference in its entirety), the promoter for the cab1R gene from rice (Luan et al., Plant Cell. 4: 971-981 (1992), herein incorporated by reference in its entirety), the pyruvate, orthophosphate dikinase (PPDK) promoter from Zea mays (Matsuoka et al., Proc. Natl. Acad. Sci. U.S.A. 90: 9586-9590 (1993), herein incorporated by reference in its entirety), the promoter for the tobacco Lhcb1*2 gene (Cerdan et al., Plant Mol. Biol. 33: 245-255. (1997), herein incorporated by reference in its entirety), the Arabidopsis thaliana SUC2 sucrose-H+ symporter promoter (Truernit et al., Planta. 196: 564-570 (1995), herein incorporated by reference in its entirety), and the promoter for the thylacoid membrane proteins from spinach (psaD, psaF, psaE, PC, FNR, atpC, atpD, cab, rbcS). Other promoters for the chlorophyl a/b-binding proteins may also be utilized in the present invention, such as the promoters for LhcB gene and PsbP gene from white mustard (Sinapis alba; Kretsch et al., Plant Mol. Biol. 28: 219-229 (1995), herein incorporated by reference in its entirety).

[0105] For the purpose of expression in sink tissues of the plant, such as the tuber of the potato plant, the fruit of tomato, or the seed of Zea mays, wheat, rice, and barley, it is preferred that the promoters utilized in the present invention have relatively high expression in these specific tissues. A number of promoters for genes with tuber-specific or -enhanced expression are known, including the class I patatin promoter (Bevan et al., EMBO J. 8: 1899-1906 (1986); Jefferson et al., Plant Mol. Biol. 14: 995-1006 (1990), both of which are herein incorporated by reference in its entirety), the promoter for the potato tuber ADPGPP genes, both the large and small subunits, the sucrose synthase promoter (Salanoubat and Belliard, Gene. 60: 47-56 (1987), Salanoubat and Belliard, Gene. 84: 181-185 (1989), both of which are herein incorporated by reference in their entirety), the promoter for the major tuber proteins including the 22 kd protein complexes and proteinase inhibitors (Hannapel, Plant Physiol. 101: 703-704 (1993), herein incorporated by reference in its entirety), the promoter for the granule bound starch synthase gene (GBSS) (Visser et al., Plant Mol. Biol. 17: 691-699 (1991), herein incorporated by reference in its entirety), and other class I and II patatins promoters (Koster-Topfer et al., Mol. Gen. Genet. 219: 390-396 (1989); Mignery et al., Gene. 62: 27-44 (1988), both of which are herein incorporated by reference in their entirety).

[0106] Other promoters can also be used to express a fructose 1,6 bisphosphate aldolase gene in specific tissues, such as seeds or fruits. The promoter for β-conglycinin (Chen et al., Dev. Genet. 10: 112-122 (1989), herein incorporated by reference in its entirety) or other seed-specific promoters such as the napin and phaseolin promoters, can be used. The zeins are a group of storage proteins found in Zea mays endosperm. Genomic clones for zein genes have been isolated (Pedersen et al., Cell 29: 1015-1026 (1982), herein incorporated by reference in its entirety), and the promoters from these clones, including the 15 kD, 16 kD, 19 kD, 22 kD, 27 kD, and gamma genes, could also be used. Other promoters known to function, for example, in Zea mays, include the promoters for the following genes: waxy, Brittle, Shrunken 2, Branching enzymes I and II, starch synthases, debranching enzymes, oleosins, glutelins, and sucrose synthases. A particularly preferred promoter for Zea mays endosperm expression is the promoter for the glutelin gene from rice, more particularly the Osgt-1 promoter (Zheng et al., Mol. Cell Biol. 13: 5829-5842 (1993), herein incorporated by reference in its entirety). Examples of promoters suitable for expression in wheat include those promoters for the ADPglucose pyrophosphorylase (ADPGPP) subunits, the granule bound and other starch synthases, the branching and debranching enzymes, the embryogenesis-abundant proteins, the gliadins, and the glutenins. Examples of such promoters in rice include those promoters for the ADPGPP subunits, the granule bound and other starch synthases, the branching enzymes, the debranching enzymes, sucrose synthases, and the glutelins. A particularly preferred promoter is the promoter for rice glutelin, Osgt-1. Examples of such promoters for barley include those for the ADPGPP subunits, the granule bound and other starch synthases, the branching enzymes, the debranching enzymes, sucrose synthases, the hordeins, the embryo globulins, and the aleurone specific proteins.

[0107] Root specific promoters may also be used. An example of such a promoter is the promoter for the acid chitinase gene (Samac et al., Plant Mol. Biol. 25: 587-596 (1994), herein incorporated by reference in its entirety). Expression in root tissue could also be accomplished by utilizing the root specific subdomains of the CaMV35S promoter that have been identified (Lam et al., Proc. Natl. Acad. Sci. U.S.A. 86: 7890-7894 (1989), herein incorporated by reference in its entirety). Other root cell specific promoters include those reported by Conkling et al. (Conkling et al., Plant Physiol. 93: 1203-1211 (1990), herein incorporated by reference in its entirety).

[0108] Additional promoters that may be utilized are described, for example, in U.S. Pat. Nos. 5,378,619, 5,391,725, 5,428,147, 5,447,858, 5,608,144, 5,608,144, 5,614,399, 5,633,441, 5,633,435, and 4,633,436, all of which are herein incorporated by reference in their entirety. In addition, a tissue specific enhancer may be used (Fromm et al., The Plant Cell 1: 977-984 (1989), herein incorporated by reference in its entirety). It is further understood that one or more of the promoters of the present invention may be used.

[0109] Constructs or vectors may also include, with the coding region of interest, a nucleic acid sequence that acts, in whole or in part, to terminate transcription of that region. For example, such sequences have been isolated including the Tr7 3′ sequence and the nos 3′ sequence (Ingelbrecht et al., The Plant Cell 1: 671-680 (1989); Bevan et al., Nucleic Acids Res. 11: 369-385 (983), both of which are herein incorporated by reference in their entirety), or the like. It is understood that one or more sequences of the present invention that act, to terminate transcription may be used.

[0110] A vector or construct may also include other regulatory elements. Examples of such include the Adh intron 1 (Callis et al., Genes and Develop. 1: 1183-1200 (1987), herein incorporated by reference in its entirety), the sucrose synthase intron (Vasil et al., Plant Physiol. 91: 1575-1579 (1989), herein incorporated by reference in its entirety) and the TMV omega element (Gallie et al., The Plant Cell 1: 301-311 (1989), herein incorporated by reference in its entirety). These and other regulatory elements may be included when appropriate. It is also understood that one or more of the regulatory regions of the present invention may be used.

[0111] A vector or construct may also include a selectable marker. Selectable markers may also be used to select for plants or plant cells that contain the exogenous genetic material. Examples of such include, but are not limited to, a neo gene (Potrykus et al., Mol. Gen. Genet. 199: 183-188 (1985), herein incorporated by reference in its entirety) which codes for kanamycin resistance and can be selected for using kanamycin, G418, etc.; a bar gene which codes for bialaphos resistance; a mutant EPSP synthase gene (Hinchee et al., Bio/Technology 6: 915-922 (1988), herein incorporated by reference in its entirety) which encodes glyphosate resistance; a nitrilase gene which confers resistance to bromoxynil (Stalker et al., J. Biol. Chem. 263: 6310-6314 (1988), herein incorporated by reference in its entirety); a mutant acetolactate synthase gene (ALS) which confers imidazolinone or sulphonylurea resistance (European Patent Application 154,204 (Sep. 11, 1985), herein incorporated by reference in its entirety); and a methotrexate resistant DHFR gene (Thillet et al., J. Biol. Chem. 263: 12500-12508 (1988), herein incorporated by reference in its entirety).

[0112] A vector or construct may also include a transit peptide. Incorporation of a suitable chloroplast transit peptide may also be employed (European Patent Application Publication Number 0218571, herein incorporated by reference in its entirety). Translational enhancers may also be incorporated as part of the vector DNA. DNA constructs could contain one or more 5′ non-translated leader sequences which may serve to enhance expression of the gene products from the resulting mRNA transcripts. Such sequences may be derived from the promoter selected to express the gene or can be specifically modified to increase translation of the mRNA. Such regions may also be obtained from viral RNAs, from suitable eukaryotic genes, or from a synthetic gene sequence. For a review of optimizing expression of transgenes, see Koziel et al., Plant Mol. Biol. 32: 393-405 (1996), herein incorporated by reference in its entirety.

[0113] A vector or construct may also include a screenable marker. Screenable markers may be used to monitor expression. Exemplary screenable markers include a β-glucuronidase or uidA gene (GUS) which encodes an enzyme for which various chromogenic substrates are known (Jefferson, Plant Mol. Biol, Rep. 5: 387-405 (1987); Jefferson et al., EMBO J. 6: 3901-3907 (1987), both of which are herein incorporated by reference in their entirety); an R-locus gene, which encodes a product that regulates the production of anthocyanin pigments (red color) in plant tissues ((Dellaporta et al., Stadler Symposium 11: 263-282 (1988), herein incorporated by reference in its entirety); a β-lactamase gene (Sutcliffe et al., Proc. Natl. Acad Sci. U.S.A. 75: 3737-3741 (1978), herein incorporated by reference in its entirety), a gene which encodes an enzyme for which various chromogenic substrates are known (e.g., PADAC, a chromogenic cephalosporin); a luciferase gene (Ow et al., Science 234: 856-859 (1986), herein incorporated by reference in its entirety) a xylE gene (Zukowsky et al., Proc. Natl. Acad. Sci. U.S.A. 80: 1101-1105 (1983), herein incorporated by reference in its entirety) which encodes a catechol diozygenase that can convert chromogenic catechols; an α-amylase gene (Ikatu et al., Bio/Technol. 8: 241-242 (1990), herein incorporated by reference in its entirety); a tyrosinase gene (Katz et al., J. Gen. Microbiol. 129: 2703-2714 (1983), herein incorporated by reference in its entirety) which encodes an enzyme capable of oxidizing tyrosine to DOPA and dopaquinone which in turn condenses to melanin; an α-galactosidase, which will turn a chromogenic α-galactose substrate.

[0114] Included within the terms “selectable or screenable marker genes” are also genes which encode a secretable marker whose secretion can be detected as a means of identifying or selecting for transformed cells. Examples include markers which encode a secretable antigen that can be identified by antibody interaction, or even secretable enzymes which can be detected catalytically. Secretable proteins fall into a number of classes, including small, diffusible proteins detectable, e.g., by ELISA, small active enzymes detectable in extracellular solution (e.g., α-amylase, β-lactamase, phosphinothricin transferase), or proteins which are inserted or trapped in the cell wall (such as proteins which include a leader sequence such as that found in the expression unit of extension or tobacco PR-S). Other possible selectable and/or screenable marker genes will be apparent to those of skill in the art.

[0115] There are many methods for introducing nucleic acid molecules into plant cells. Suitable methods are believed to include virtually any method by which nucleic acid molecules may be introduced into a cell, such as by Agrobacterium infection or direct delivery of nucleic acid molecules such as, for example, by PEG-mediated transformation, by electroporation or by acceleration of DNA coated particles, etc. (Potrykus, Ann. Rev. Plant Physiol. Plant Mol. Biol. 42: 205-225 (1991); Vasil, Plant Mol. Biol. 25: 925-937 (1994), both of which are herein incorporated by reference in their entirety). For example, electroporation has been used to transform Zea mays protoplasts (Fromm et al., Nature 312: 791-793 (1986), herein incorporated by reference in its entirety).

[0116] Other vector systems suitable for introducing transforming DNA into a host plant cell includes but is not limited to binary artificial chromosome (BIBAC) vectors (Hamilton et al., Gene 200:107-116, (1997), herein incorporated by reference in its entirety, and transfection with RNA viral vectors (Della-Cioppa et al., Ann. N.Y. Acad. Sci. (1996), 792 (Engineering Plants for Commercial Products and Applications), 57-61, herein incorporated by reference in its entirety.

[0117] Technology for introduction of DNA into cells is well known to those of skill in the art. Four general methods for delivering a gene into cells have been described: (1) chemical methods (Graham and van der Eb, Virology, 54: 536-539 (1973), herein incorporated by reference in its entirety); (2) physical methods such as microinjection (Capecchi, Cell 22: 479-488 (1980), herein incorporated by reference in its entirety), electroporation (Wong and Neumann, Biochem. Biophys. Res. Commun. 107: 584-587 (1982); Fromm et al., Proc. Natl. Acad. Sci. U.S.A. 82: 5824-5828 (1985); U.S. Pat. No. 5,384,253, all of which are herein incorporated by reference in their entirety), and the gene gun (Johnston and Tang, Methods Cell Biol. 43: 353-365 (1994), herein incorporated by reference in its entirety); (3) viral vectors (Clapp, Clin. Perinatol. 20: 155-168 (1993); Lu et al., J. Exp. Med. 178: 2089-2096 (1993); Eglitis and Anderson, Biotechnique 6: 608-614 (1988), all of which the entirety are herein incorporated by reference); and (4) receptor-mediated mechanisms (Curiel et al., Hum. Gen. Ther. 3: 147-154 (1992); Wagner et al., Proc. Natl. Acad. Sci. U.S.A. 89: 6099-6103 (1992), all of which the entirety are herein incorporated by reference).

[0118] Acceleration methods that may be used include, for example, microprojectile bombardment and the like. One example of a method for delivering transforming nucleic acid molecules to plant cells is microprojectile bombardment. This method has been reviewed by Yang and Christou, eds., Particle Bombardment Technology for Gene Transfer, Oxford Press, Oxford, England (1994), herein incorporated by reference in its entirety). Non-biological particles (microprojectiles) that may be coated with nucleic acids and delivered into cells by a propelling force. Exemplary particles include those comprised of tungsten, gold, platinum, and the like.

[0119] A particular advantage of microprojectile bombardment, in addition to it being an effective means of reproducibly, and stably transforming monocotyledons, is that neither the isolation of protoplasts (Cristou et al., Plant Physiol. 87: 671-674 (1988), herein incorporated by reference in its entirety) nor the susceptibility of Agrobacterium infection is required. An illustrative embodiment of a method for delivering DNA into maize cells by acceleration is a biolistics-particle delivery system, which can be used to propel particles coated with DNA through a screen, such as a stainless steel or Nytex screen, onto a filter surface covered with corn cells cultured in suspension. Gordon-Kamm et al., describes the basic procedure for coating tungsten particles with DNA (Gordon-Kamm et al., Plant Cell 2: 603-618 (1990), herein incorporated by reference in its entirety). The screen disperses the tungsten nucleic acid particles so that they are not delivered to the recipient cells in large aggregates. A particle delivery system suitable for use with the present invention is the helium acceleration PDS-1000/He gun which is available from Bio-Rad Laboratories (Bio-Rad, Hercules, Calif.) (Sanford et al., Technique 3: 3-16 (1991), herein incorporated by reference in its entirety).

[0120] For the bombardment, cells in suspension may be concentrated on filters. Filters containing the cells to be bombarded are positioned at an appropriate distance below the microprojectile stopping plate. If desired, one or more screens are also positioned between the gun and the cells to be bombarded.

[0121] Alternatively, immature embryos or other target cells may be arranged on solid culture medium. The cells to be bombarded are positioned at an appropriate distance below the macroprojectile stopping plate. If desired, one or more screens are also positioned between the acceleration device and the cells to be bombarded. Through the use of techniques set forth herein one may obtain up to 1000 or more foci of cells transiently expressing a marker gene. The number of cells in a focus which express the exogenous gene product 48 hours post-bombardment often range from one to ten and average one to three.

[0122] In another alternative embodiment, plastids can be stably transformed. Methods suitable for plastid transformation in higher plants include particle gun delivery of DNA containing a selectable marker and targeting of the DNA to the plastid genome through homologous recombination (Svab et al. Proc. Natl. Acad. Sci. (U.S.A.) 87:8526-8530 (1990): Svab and Maliga Proc. Natl. Acad. Sci. (U.S.A.) 90:913-917 (1993); Staub and Maliga, P. EMBO J. 12:601-606 (1993), U.S. Pat. Nos. 5,451,513 and 5,545,818, all of which are herein incorporated by reference in their entirety).

[0123] In bombardment transformation, one may optimize the prebombardment culturing conditions and the bombardment parameters to yield the maximum numbers of stable transformants. Both the physical and biological parameters for bombardment are important in this technology. Physical factors are those that involve manipulating the DNA/microprojectile precipitate or those that affect the flight and velocity of either the macro- or microprojectiles. Biological factors include all steps involved in manipulation of cells before and immediately after bombardment, the osmotic adjustment of target cells to help alleviate the trauma associated with bombardment, and also the nature of the transforming DNA, such as linearized DNA or intact supercoiled plasmids. It is believed that pre-bombardment manipulations are especially important for successful transformation of immature embryos.

[0124] Accordingly, it is contemplated that one may wish to adjust various aspects of the bombardment parameters in small scale studies to fully optimize the conditions. One may particularly wish to adjust physical parameters such as gap distance, flight distance, tissue distance, and helium pressure. One may also minimize the trauma reduction factors by modifying conditions which influence the physiological state of the recipient cells and which may therefore influence transformation and integration efficiencies. For example, the osmotic state, tissue hydration and the subculture stage or cell cycle of the recipient cells may be adjusted for optimum transformation. The execution of other routine adjustments will be known to those of skill in the art in light of the present disclosure.

[0125] Agrobacterium-mediated transfer is a widely applicable system for introducing genes into plant cells because the DNA can be introduced into whole plant tissues, thereby bypassing the need for regeneration of an intact plant from a protoplast. The use of Agrobacterium-mediated plant integrating vectors to introduce DNA into plant cells is well known in the art. See, for example, the methods described (Fraley et al., Biotechnology 3: 629-635 (1985); Rogers et al., Meth. Enzymol. 153: 253-277 (1987), both of which are herein incorporated by reference in their entirety. Further, the integration of the Ti-DNA is a relatively precise process resulting in few rearrangements. The region of DNA to be transferred is defined by the border sequences, and intervening DNA is usually inserted into the plant genome as described (Spielmann et al., Mol. Gen. Genet. 205: 34 (1986), herein incorporated by reference in its entirety).

[0126] Modern Agrobacterium transformation vectors are capable of replication in E. coli as well as Agrobacterium, allowing for convenient manipulations as described (Klee et al., In: Plant DNA Infectious Agents, T. Hohn and J. Schell, eds., Springer-Verlag, New York, pp. 179-203 (1985), herein incorporated by reference in its entirety). Moreover, recent technological advances in vectors for Agrobacterium-mediated gene transfer have improved the arrangement of genes and restriction sites in the vectors to facilitate construction of vectors capable of expressing various polypeptide coding genes. The vectors described have convenient multi-linker regions flanked by a promoter and a polyadenylation site for direct expression of inserted polypeptide coding genes and are suitable for present purposes (Rogers et al., Meth. In Enzymol, 153: 253-277 (1987), herein incorporated by reference in its entirety). In addition, Agrobacterium containing both armed and disarmed Ti genes can be used for the transformations. In those plant strains where Agrobacterium-mediated transformation is efficient, it is the method of choice because of the facile and defined nature of the gene transfer.

[0127] A transgenic plant formed using Agrobacterium transformation methods typically contains a single gene on one chromosome. Such transgenic plants can be referred to as being heterozygous for the added gene. More preferred is a transgenic plant that is homozygous for the added structural gene; i.e., a transgenic plant that contains two added genes, one gene at the same locus on each chromosome of a chromosome pair. A homozygous transgenic plant can be obtained by sexually mating (selfing) an independent segregant transgenic plant that contains a single added gene, germinating some of the seed produced and analyzing the resulting plants produced for the gene of interest.

[0128] It is also to be understood that two different transgenic plants can also be mated to produce offspring that contain two independently segregating added, exogenous genes. Selfing of appropriate progeny can produce plants that are homozygous for both added, exogenous genes that encoding a polypeptide of interest. Back-crossing to a parental plant and out-crossing with a non-transgenic plant are also contemplated, as is vegetative propagation.

[0129] The present invention also provides for parts of the plants of the present invention. Plant parts, without limitation, include seed, endosperm, ovule and pollen. In a particularly preferred embodiment of the present invention, the plant part is a seed.

[0130] Transformation of plant protoplasts can be achieved using methods based on calcium phosphate precipitation, polyethylene glycol treatment, electroporation, and combinations of these treatments. See for example (Potrykus et al., Mol. Gen. Genet 205: 193-200 (1986); Lorz et al., Mol. Gen. Genet. 199: 178, (1985); Fromm et al., Nature 319: 791(1986); Uchimiya et al., Mol. Gen. Genet. 204:204 (1986); Callis et al., Genes and Development 1183 (1987); Marcotte et al., Nature 335:454 (1988), all of which are herein incorporated by reference in their entirety).

[0131] Application of these systems to different plant strains depends upon the ability to regenerate that particular plant strain from protoplasts. Illustrative methods for the regeneration of cereals from protoplasts are described (Fujimura et al., Plant Tissue Culture Letters 2: 74 (1985); Toriyama et al., Theor Appl. Genet. 205: 34 (1986); Yamada et al., Plant Cell Rep. 4: 85 (1986); Abdullah et al., Biotechnology 4: 1087 (1986), all of which are herein incorporated by reference in their entirety).

[0132] To transform plant strains that cannot be successfully regenerated from protoplasts, other ways to introduce DNA into intact cells or tissues can be utilized. For example, regeneration of cereals from immature embryos or explants can be effected as described (Vasil, Biotechnology 6: 397 (1988), herein incorporated by reference in its entirety). In addition, “particle gun” or high-velocity microprojectile technology can be utilized (Vasil et al., Bio/Technology 10: 667, (1992), herein incorporated by reference in its entirety).

[0133] Using the latter technology, DNA is carried through the cell wall and into the cytoplasm on the surface of small metal particles as described (Klein et al., Nature 328: 70 (1987); Klein et al., Proc. Natl. Acad. Sci. U.S.A. 85: 8502-8505 (1988); McCabe et al., Biotechnology 6 :923 (1988), all of which are herein incorporated by reference in their entirety). The metal particles penetrate through several layers of cells and thus allow the transformation of cells within tissue explants.

[0134] Other methods of cell transformation can also be used and include but are not limited to introduction of DNA into plants by direct DNA transfer into pollen (Zhou et al., Meth. Enzymol. 101: 433 (1983); Hess et al., Intern Rev. Cytol. 107:367 (1987); Luo et al., Plant Mol. Biol. Reporter 6: 165 (1988), all of which are herein incorporated by reference in their entirety), by direct injection of DNA into reproductive organs of a plant (Pena et al., Nature 325: 274 (1987), herein incorporated by reference in its entirety), or by direct injection of DNA into the cells of immature embryos followed by the rehydration of dessicated embryos (Neuhaus et al., Theor. Appl. Genet. 75: 30,(1987), herein incorporated by reference in its entirety).

[0135] The regeneration, development, and cultivation of plants from single plant protoplast transformants or from various transformed explants is well known in the art (Weissbach and Weissbach, In: Methods for Plant Molecular Biology, (Eds.), Academic Press, Inc. San Diego, Calif., (1988), herein incorporated by reference in its entirety). This regeneration and growth process typically includes the steps of selection of transformed cells, culturing those individualized cells through the usual stages of embryonic development through the rooted plantlet stage. Transgenic embryos and seeds are similarly regenerated. The resulting transgenic rooted shoots are thereafter planted in an appropriate plant growth medium such as soil.

[0136] The development or regeneration of plants containing the foreign, exogenous gene that encodes a protein of interest is well known in the art. Preferably, the regenerated plants are self-pollinated to provide homozygous transgenic plants, as discussed before. Otherwise, pollen obtained from the regenerated plants is crossed to seed-grown plants of agronomically important lines. Conversely, pollen from plants of these important lines is used to pollinate regenerated plants. A transgenic plant of the present invention containing a desired polypeptide is cultivated using methods well known to one skilled in the art.

[0137] There are a variety of methods for the regeneration of plants from plant tissue. The particular method of regeneration will depend on the starting plant tissue and the particular plant species to be regenerated.

[0138] Methods for transforming dicots, primarily by use of Agrobacterium tumefaciens, and obtaining transgenic plants have been published for cotton (U.S. Pat. No. 5,004,863, U.S. Pat. No. 5,159,135, U.S. Pat. No. 5,518,908, all of which are herein incorporated by reference in their entirety); soybean (U.S. Pat. No. 5,569,834, U.S. Pat. No. 5,416,011, McCabe et al., Biotechnology 6: 923 (1988), Christou et al., Plant Physiol. 87: 671-674 (1988), all of which are herein incorporated by reference in their entirety); Brassica ( U.S. Pat. No. 5,463,174, herein incorporated by reference in its entirety); peanut (Cheng et al., Plant Cell Rep. 15: 653-657 (1996), McKently et al., Plant Cell Rep. 14: 699-703 (1995), all of which are herein incorporated by reference in their entirety); papaya (Yang et al., (1996), herein incorporated by reference in its entirety); pea (Grant et al., Plant Cell Rep. 15: 254-258, (1995), herein incorporated by reference in its entirety).

[0139] Transformation of monocotyledons using electroporation, particle bombardment, and Agrobacterium have also been reported. Transformation and plant regeneration have been achieved in asparagus (Bytebier et al., Proc. Natl. Acad. Sci. U.S.A. 84: 5345, (1987), herein incorporated by reference in its entirety); barley (Wan and Lemaux, Plant Physiol 104: 37 (1994), herein incorporated by reference in its entirety); maize (Rhodes et al., Science 240: 204 (1988), Gordon-Kamm et al., Plant Cell 2: 603, (1990), Fromm et al., Bio/Technology 8: 833 (1990), Koziel et al., Bio/Technology 11: 194 (1993), Armstrong et al., Crop Science 35: 550-557 (1995), all of which are herein incorporated by reference in their entirety); oat (Somers et al., BiolTechnology 10: 1589 (1992), herein incorporated by reference in its entirety); orchardgrass (Horn et al., Plant Cell Rep. 7: 469 (1988), herein incorporated by reference in its entirety); rice (Toriyama et al., Theor Appl. Genet. 205: 34 (1986); Park et al., Plant Mol. Biol. 32: 1135-1148, (1996); Abedinia et al., Aust. J. Plant Physiol. 24: 133-141, (1997); Zhang and Wu, Theor. Appl. Genet. 76: 835, (1988); Zhang et al. Plant Cell Rep. 7: 379, (1988); Battraw and Hall, Plant Sci. 86: 191-202, (1992); Christou et al., Bio/Technology 9: 957, (1991), all of which are herein incorporated by reference in their entirety); sugarcane (Bower and Birch, Plant J. 2: 409, (1992), herein incorporated by reference in its entirety); tall fescue (Wang et al., Bio/Technology 10:691 (1992), herein incorporated by reference in its entirety), and wheat (Vasil et al., Bio/Technology 10:667 (1992); U.S. Pat. No. 5,631,152, both of which are herein incorporated by reference in their entirety.

[0140] Assays for gene expression based on the transient expression of cloned nucleic acid constructs have been developed by introducing the nucleic acid molecules into plant cells by polyethylene glycol treatment, electroporation, or particle bombardment (Marcotte et al., Nature 335: 454-457 (1988); Marcotte et al., Plant Cell 1: 523-532 (1989); McCarty et al., Cell 66: 895-905 (1991); Hattori et al., Genes Dev. 6: 609-618 (1992); Goff et al., EMBO J. 9: 2517-2522 (1990), all of which are herein incorporated by reference in their entirety). Transient expression systems may be used to functionally dissect gene constructs (See generally, Mailga et al., Methods in Plant Molecular Biology, Cold Spring Harbor Press (1995), herein incorporated by reference in its entirety).

[0141] Any of the nucleic acid molecules of the present invention may be introduced into a plant cell in a permanent or transient manner in combination with other genetic elements such as vectors, promoters enhancers etc. Further any of the Cyanidium caldarium gene homologue or fragment thereof homologies of the present invention may be introduced into a plant cell in a manner that allows for over expression of the protein or fragment thereof encoded by the nucleic acid molecule.

[0142] Antibodies have been expressed in plants (Hiatt et al., Nature 342: 76-78 (1989); Conrad and Fielder, Plant Mol. Biol. 26: 1023-1030 (1994), both of which are herein incorporated by reference in their entirety). Cytoplamsic expression of a scFv (single-chain Fv antibodies) has been reported to delay infection by artichoke mottled crinkle virus. Transgenic plants that express antibodies directed against endogenous proteins may exhibit a physiological effect (Philips et al., EMBO J. 16:4489-4496 (1997); Marion-Poll, Trends in Plant Science 2:447-448 (1997), both of which are herein incorporated by reference in their entirety). For example, expressed anti-abscisic antibodies reportedly result in a general perturbation of seed development (Philips et al., EMBO J. 16:4489-4496 (1997), herein incorporated by reference in its entirety).

[0143] Antibodies that are catalytic may also be expressed in plants (abzymes). The principle behind abzymes is that since antibodies may be raised against many molecules, this recognition ability can be directed toward generating antibodies that bind transition states to force a chemical reaction forward (Persidas, Nature Biotechnology 15: 1313-1315 (1997); Baca et al., Ann. Rev. Biophys. Biomol. Struct. 26: 461-493 (1997), both of which are herein incorporated by reference in their entirety). The catalytic abilities of abzymes may be enhanced by site directed mutagensis. Examples of abzymes are, for example, set forth in U.S. Pat. No. 5,658,753; U.S. Pat. No. 5,632,990; U.S. Pat. No. 5,631,137; U.S. Pat. No. 5,602,015; U.S. Pat. No. 5,559,538; U.S. Pat. No. 5,576,174; U.S. Pat. No. 5,500,358; U.S. Pat. 5,318,897; U.S. Pat. No. 5,298,409; U.S. Pat. No. 5,258,289 and U.S. Pat. No. 5,194,585, all of which are herein incorporated in their entirety.

[0144] It is understood that any of the antibodies of the present invention may be expressed in plants and that such expression can result in a physiological effect. It is also understood that any of the expressed antibodies may be catalytic.

[0145] (f) Fungal Constructs and Fungal Transformants

[0146] The present invention also relates to a fungal recombinant vector comprising exogenous genetic material. The present invention also relates to a fungal cell comprising a fungal recombinant vector. The present invention also relates to methods for obtaining a recombinant fungal host cell comprising introducing into a fungal host cell exogenous genetic material.

[0147] Exogenous genetic material may be transferred into a fungal cell. Exogenous genetic material is any genetic material, whether naturally occurring or otherwise, from any source that is capable of being inserted into any organism. In a preferred embodiment the exogenous genetic material includes a nucleic acid molecule having a sequence selected from the group consisting of SEQ ID NO: 1 through SEQ ID NO: 5674 or complements thereof.

[0148] The fungal recombinant vector may be any vector which can be conveniently subjected to recombinant DNA procedures. The choice of a vector will typically depend on the compatibility of the vector with the fungal host cell into which the vector is to be introduced. The vector may be a linear or a closed circular plasmid. The vector system may be a single vector or plasmid or two or more vectors or plasmids which together contain the total DNA to be introduced into the genome of the fungal host.

[0149] The fungal vector may be an autonomously replicating vector, i.e., a vector which exists as an extrachromosomal entity, the replication of which is independent of chromosomal replication, e.g., a plasmid, an extrachromosomal element, a minichromosome, or an artificial chromosome. The vector may contain any means for assuring self-replication. Alternatively, the vector may be one which, when introduced into the fungal cell, is integrated into the genome and replicated together with the chromosome(s) into which it has been integrated. For integration, the vector may rely on the nucleic acid sequence of the vector for stable integration of the vector into the genome by homologous or nonhomologous recombination. Alternatively, the vector may contain additional nucleic acid sequences for directing integration by homologous recombination into the genome of the fungal host. The additional nucleic acid sequences enable the vector to be integrated into the host cell genome at a precise location(s) in the chromosome(s). To increase the likelihood of integration at a precise location, there should be preferably two nucleic acid sequences which individually contain a sufficient number of nucleic acids, preferably 400 bp to 1500 bp, more preferably 800 bp to 1000 bp, which are highly homologous with the corresponding target sequence to enhance the probability of homologous recombination. These nucleic acid sequences may be any sequence that is homologous with a target sequence in the genome of the fungal host cell, and, furthermore, may be non-encoding or encoding sequences.

[0150] For autonomous replication, the vector may further comprise an origin of replication enabling the vector to replicate autonomously in the host cell in question. Examples of origin of replications for use in a yeast host cell are the 2 micron origin of replication and the combination of CEN3 and ARS 1. Any origin of replication may be used which is compatible with the fungal host cell of choice.

[0151] The vectors of the present invention preferably contain one or more selectable markers which permit easy selection of transformed cells. A selectable marker is a gene the product of which provides, for example biocide or viral resistance, resistance to heavy metals, prototrophy to auxotrophs, and the like. The selectable marker may be selected from the group including, but not limited to, amdS (acetamidase), argB (ornithine carbamoyltransferase), bar (phosphinothricin acetyltransferase), hygB (hygromycin phosphotransferase), niaD (nitrate reductase), pyrG (orotidine-5′-phosphate decarboxylase), and sC (sulfate adenyltransferase), and trpC (anthranilate synthase). Preferred for use in an Aspergillus cell are the amdS and pyrG markers of Aspergillus nidulans or Aspergillus oryzae and the bar marker of Streptomyces hygroscopicus. Furthermore, selection may be accomplished by co-transformation, e.g., as described in WO 91/17243, herein incorporated by reference in its entirety. A nucleic acid sequence of the present invention may be operably linked to a suitable promoter sequence. The promoter sequence is a nucleic acid sequence which is recognized by the fungal host cell for expression of the nucleic acid sequence. The promoter sequence contains transcription and translation control sequences which mediate the expression of the protein or fragment thereof.

[0152] A promoter may be any nucleic acid sequence which shows transcriptional activity in the fungal host cell of choice and may be obtained from genes encoding polypeptides either homologous or heterologous to the host cell. Examples of suitable promoters for directing the transcription of a nucleic acid construct of the invention in a filamentous fungal host are promoters obtained from the genes encoding Aspergillus oryzae TAKA amylase, Rhizomucor miehei aspartic proteinase, Aspergillus niger neutral alpha-amylase, Aspergillus niger acid stable alpha-amylase, Aspergillus niger or Aspergillus awamori glucoamylase (glaA), Rhizomucor miehei lipase, Aspergillus oryzae alkaline protease, Aspergillus oryzae triose phosphate isomerase, Aspergillus nidulans acetamidase, and hybrids thereof. In a yeast host, a useful promoter is the Saccharomyces cerevisiae enolase (eno-1) promoter. Particularly preferred promoters are the TAKA amylase, NA2-tpi (a hybrid of the promoters from the genes encoding Aspergillus niger neutral alpha-amylase and Aspergillus oryzae triose phosphate isomerase), and glaA promoters.

[0153] A protein or fragment thereof encoding nucleic acid molecule of the present invention may also be operably linked to a terminator sequence at its 3′ terminus. The terminator sequence may be native to the nucleic acid sequence encoding the protein or fragment thereof or may be obtained from foreign sources. Any terminator which is functional in the fungal host cell of choice may be used in the present invention, but particularly preferred terminators are obtained from the genes encoding Aspergillus oryzae TAKA amylase, Aspergillus niger glucoamylase, Aspergillus nidulans anthranilate synthase, Aspergillus niger alpha-glucosidase, and Saccharomyces cerevisiae enolase.

[0154] A protein or fragment thereof encoding nucleic acid molecule of the present invention may also be operably linked to a suitable leader sequence. A leader sequence is a nontranslated region of a mRNA which is important for translation by the fungal host. The leader sequence is operably linked to the 5′ terminus of the nucleic acid sequence encoding the protein or fragment thereof. The leader sequence may be native to the nucleic acid sequence encoding the protein or fragment thereof or may be obtained from foreign sources. Any leader sequence which is functional in the fungal host cell of choice may be used in the present invention, but particularly preferred leaders are obtained from the genes encoding Aspergillus oryzae TAKA amylase and Aspergillus oryzae triose phosphate isomerase.

[0155] A polyadenylation sequence may also be operably linked to the 3′ terminus of the nucleic acid sequence of the present invention. The polyadenylation sequence is a sequence which when transcribed is recognized by the fungal host to add polyadenosine residues to transcribed mRNA. The polyadenylation sequence may be native to the nucleic acid sequence encoding the protein or fragment thereof or may be obtained from foreign sources. Any polyadenylation sequence which is functional in the fungal host of choice may be used in the present invention, but particularly preferred polyadenylation sequences are obtained from the genes encoding Aspergillus oryzae TAKA amylase, Aspergillus niger glucoamylase, Aspergillus nidulans anthranilate synthase, and Aspergillus niger alpha-glucosidase.

[0156] To avoid the necessity of disrupting the cell to obtain the protein or fragment thereof, and to minimize the amount of possible degradation of the expressed protein or fragment thereof within the cell, it is preferred that expression of the protein or fragment thereof gives rise to a product secreted outside the cell. To this end, the protein or fragment thereof of the present invention may be linked to a signal peptide linked to the amino terminus of the protein or fragment thereof. A signal peptide is an amino acid sequence which permits the secretion of the protein or fragment thereof from the fungal host into the culture medium. The signal peptide may be native to the protein or fragment thereof of the invention or may be obtained from foreign sources. The 5′ end of the coding sequence of the nucleic acid sequence of the present invention may inherently contain a signal peptide coding region naturally linked in translation reading frame with the segment of the coding region which encodes the secreted protein or fragment thereof. Alternatively, the 5′ end of the coding sequence may contain a signal peptide coding region which is foreign to that portion of the coding sequence which encodes the secreted protein or fragment thereof. The foreign signal peptide may be required where the coding sequence does not normally contain a signal peptide coding region. Alternatively, the foreign signal peptide may simply replace the natural signal peptide to obtain enhanced secretion of the desired protein or fragment thereof. The foreign signal peptide coding region may be obtained from a glucoamylase or an amylase gene from an Aspergillus species, a lipase or proteinase gene from Rhizomucor miehei, the gene for the alpha-factor from Saccharomyces cerevisiae, or the calf preprochymosin gene. An effective signal peptide for fungal host cells is the Aspergillus oryzae TAKA amylase signal, Aspergillus niger neutral amylase signal, the Rhizomucor miehei aspartic proteinase signal, the Humicola lanuginosus cellulase signal, or the Rhizomucor miehei lipase signal. However, any signal peptide capable of permitting secretion of the protein or fragment thereof in a fungal host of choice may be used in the present invention.

[0157] A protein or fragment thereof encoding nucleic acid molecule of the present invention may also be linked to a propeptide coding region. A propeptide is an amino acid sequence found at the amino terminus of aproprotein or proenzyme. Cleavage of the propeptide from the proprotein yields a mature biochemically active protein. The resulting polypeptide is known as a propolypeptide or proenzyme (or a zymogen in some cases). Propolypeptides are generally inactive and can be converted to mature active polypeptides by catalytic or autocatalytic cleavage of the propeptide from the propolypeptide or proenzyme. The propeptide coding region may be native to the protein or fragment thereof or may be obtained from foreign sources. The foreign propeptide coding region may be obtained from the Saccharomyces cerevisiae alpha-factor gene or Myceliophthora thermophila laccase gene (WO 95/33836, herein incorporated by reference in its entirety).

[0158] The procedures used to ligate the elements described above to construct the recombinant expression vector of the present invention are well known to one skilled in the art (see, for example, Sambrook, 2nd ed., et al., Molecular Cloning, A Laboratory Manual Cold Spring Harbor, N.Y, (1989)).

[0159] The present invention also relates to recombinant fungal host cells produced by the methods of the present invention which are advantageously used with the recombinant vector of the present invention. The cell is preferably transformed with a vector comprising a nucleic acid sequence of the invention followed by integration of the vector into the host chromosome. The choice of fungal host cells will to a large extent depend upon the gene encoding the protein or fragment thereof and its source. The fungal host cell may be a yeast cell or a filamentous fungal cell.

[0160] “Yeast” as used herein includes Ascosporogenous yeast (Endomycetales), Basidiosporogenous yeast, and yeast belonging to the Fungi Imperfecti (Blastomycetes). The Ascosporogenous yeasts are divided into the families Spermophthoraceae and Saccharomycetaceae. The latter is comprised of four subfamilies, Schizosaccharomycoideae (for example, genus Schizosaccharomyces), Nadsonioideae, Lipomycoideae, and Saccharomycoideae (for example, genera Pichia, Kluyveromyces and Saccharomyces). The Basidiosporogenous yeasts include the genera Leucosporidim, Rhodosporidium, Sporidiobolus, Filobasidium, and Filobasidiella. Yeast belonging to the Fungi Imperfecti are divided into two families, Sporobolomycetaceae (for example, genera Sorobolomyces and Bullera) and Cryptococcaceae (for example, genus Candida). Since the classification of yeast may change in the future, for the purposes of this invention, yeast shall be defined as described in Biology and Activities of Yeast (Skinner et al., eds, Soc. App. Bacteriol. Symposium Series No. 9, (1980), herein incorporated by reference in its entirety). The biology of yeast and manipulation of yeast genetics are well known in the art (see, for example, Biochemistry and Genetics of Yeast, Bacil, Horecker, and Stopani, editors, 2nd edition, 1987; The Yeasts, Rose, and Harrison, editors, 2nd edition, (1987); and The Molecular Biology of the Yeast Saccharomyces, Strathem et al., editors, (1981), all of which are herein incorporated by reference in their entirety).

[0161] “Fungi” as used herein includes the phyla Ascomycota, Basidiomycota, Chytridiomycota, and Zygomycota (as defined by Hawksworth et al., In: Ainsworth and Bisby's Dictionary of The Fungi, 8th edition, 1995, CAB International, University Press, Cambridge, UK; herein incorporated by reference in its entirety) as well as the Oomycota (as cited in Hawksworth et al., In: Ainsworth and Bisby's Dictionary of The Fungi, 8th edition, 1995, CAB International, University Press, Cambridge, UK) and all mitosporic fungi (Hawksworth et al., In: Ainsworth and Bisby's Dictionary of The Fungi, 8th edition, 1995, CAB International, University Press, Cambridge, UK). Representative groups of Ascomycota include, for example, Neurospora, Eupenicillium (=Penicillium), Emericella (=Aspergillus), Eurotiun (=Aspergillus), and the true yeasts listed above. Examples of Basidiomycota include mushrooms, rusts, and smuts. Representative groups of Chytridiomycota include, for example, Allomyces, Blastocladiella, Coelomomyces, and aquatic fungi. Representative groups of Oomycota include, for example, Saprolegniomycetous aquatic fungi (water molds) such as Achlya. Examples of mitosporic fungi include Aspergillus, Penicilliun, Candida, and Alternaria. Representative groups of Zygomycota include, for example, Rhizopus and Mucor.

[0162] “Filamentous fungi” include all filamentous forms of the subdivision Eumycota and Oomycota (as defined by Hawksworth et al., In: Ainsworth and Bisby's Dictionary of The Fungi, 8th edition, 1995, CAB International, University Press, Cambridge, UK). The filamentous fungi are characterized by a vegetative mycelium composed of chitin, cellulose, glucan, chitosan, mannan, and other complex polysaccharides. Vegetative growth is by hyphal elongation and carbon catabolism is obligately aerobic. In contrast, vegetative growth by yeasts such as Saccharomyces cerevisiae is by budding of a unicellular thallus and carbon catabolism may be fermentative.

[0163] In one embodiment, the fungal host cell is a yeast cell. In a preferred embodiment, the yeast host cell is a cell of the species of Candida, Kluyveromyces, Saccharomyces, Schizosaccharomyces, Pichia, and Yarrowia. In a preferred embodiment, the yeast host cell is a Saccharomyces cerevisiae cell, a Saccharomyces carlsbergensis, Saccharomyces diastaticus cell, a Saccharomyces douglasii cell, a Saccharomyces kluyveri cell, a Saccharomyces norbensis cell, or a Saccharomyces oviformis cell. In another preferred embodiment, the yeast host cell is a Kluyveromyces lactis cell. In another preferred embodiment, the yeast host cell is a Yarrowia lipolytica cell.

[0164] In another embodiment, the fungal host cell is a filamentous fungal cell. In a preferred embodiment, the filamentous fungal host cell is a cell of the species of, but not limited to, Acremonium, Aspergillus, Fusarium, Humicola, Myceliophthora, Mucor, Neurospora, Penicillium, Thielavia, Tolypocladium, and Trichoderma. In a preferred embodiment, the filamentous fungal host cell is an Aspergillus cell. In another preferred embodiment, the filamentous fungal host cell is an Acremonium cell. In another preferred embodiment, the filamentous fungal host cell is a Fusarium cell. In another preferred embodiment, the filamentous fungal host cell is a Humicola cell. In another preferred embodiment, the filamentous fungal host cell is a Myceliophthora cell. In another even preferred embodiment, the filamentous fungal host cell is a Mucor cell. In another preferred embodiment, the filamentous fungal host cell is a Neurospora cell. In another preferred embodiment, the filamentous fungal host cell is a Penicillium cell. In another preferred embodiment, the filamentous fungal host cell is a Thielavia cell. In another preferred embodiment, the filamentous fungal host cell is a Tolypocladiun cell. In another preferred embodiment, the filamentous fungal host cell is a Trichoderma cell. In a preferred embodiment, the filamentous fungal host cell is an Aspergillus oryzae cell, an Aspergillus niger cell, an Aspergillus foetidus cell, or an Aspergillus japonicus cell. In another preferred embodiment, the filamentous fungal host cell is a Fusarium oxysporum cell or a Fusarium graminearum cell. In another preferred embodiment, the filamentous fungal host cell is a Humicola insolens cell or a Humicola lanuginosus cell. In another preferred embodiment, the filamentous fungal host cell is a Myceliophthora thermophila cell. In a most preferred embodiment, the filamentous fungal host cell is a Mucor miehei cell. In a most preferred embodiment, the filamentous fungal host cell is a Neurospora crassa cell. In a most preferred embodiment, the filamentous fungal host cell is a Penicillium purpurogenum cell. In another most preferred embodiment, the filamentous fungal host cell is a Thielavia terrestris cell. In another most preferred embodiment, the Trichoderma cell is a Trichoderma reesei cell, a Trichoderna viride cell, a Trichoderma longibrachiatum cell, a Trichoderma harzianum cell, or a Trichoderma koningii cell. In a particulary preferred embodiment, the fungal host cell is selected from an A. nidulans cell, an A. niger cell, an A. oryzae cell and an A. sojae cell. In a further particulary preferred embodiment, the fungal host cell is an A. nidulans cell.

[0165] The recombinant fungal host cells of the present invention may further comprise one or more sequences which encode one or more factors that are advantageous in the expression of the protein or fragment thereof, for example, an activator (e.g., a trans-acting factor), a chaperone, and a processing protease. The nucleic acids encoding one or more of these factors are preferably not operably linked to the nucleic acid encoding the protein or fragment thereof. An activator is a protein which activates transcription of a nucleic acid sequence encoding a polypeptide (Kudla et al., EMBO 9: 1355-1364(1990); Jarai and Buxton, Current Genetics 26: 2238-244(1994); Verdier, Yeast 6: 271-297(1990), all of which are herein incorporated by reference in their entirety). The nucleic acid sequence encoding an activator may be obtained from the genes encoding Saccharomyces cerevisiae heme activator protein 1 (hap1), Saccharomyces cerevisiae galactose metabolizing protein 4 (gal4), and Aspergillus nidulans ammonia regulation protein (areA). For further examples, see Verdier, Yeast 6: 271-297 (1990); MacKenzie et al., Journal of Gen. Microbiol. 139: 2295-2307 (1993), both of which are herein incorporated by reference in their entirety). A chaperone is a protein which assists another protein in folding properly (Hartl et al., TIBS 19: 20-25 (1994); Bergeron et al., TIBS 19: 124-128 (1994); Demolder et al., J. Biotechnology 32: 179-189 (1994); Craig, Science 260: 1902-1903(1993); Gething and Sambrook, Nature 355: 33-45 (1992); Puig and Gilbert, J Biol. Chem. 269: 7764-7771 (1994); Wang and Tsou, FASEB Journal 7: 1515-11157 (1993); Robinson et al., Bio/Technology 1: 381-384 (1994), all of which are herein incorporated by reference in their entirety). The nucleic acid sequence encoding a chaperone may be obtained from the genes encoding Aspergillus oryzae protein disulphide isomerase, Saccharomyces cerevisiae calnexin, Saccharomyces cerevisiae BiP/GRP78, and Saccharomyces cerevisiae Hsp70. For further examples, see Gething and Sambrook, Nature 355: 33-45 (1992); Hartl et al., TIBS 19: 20-25 (1994), both of which are herein incorporated by reference in their entirety. A processing protease is a protease that cleaves a propeptide to generate a mature biochemically active polypeptide (Enderlin and Ogrydziak, Yeast 10: 67-79 (1994); Fuller et al., Proc. Natl. Acad. Sci. (U.S.A.) 86: 1434-1438 (1989); Julius et al., Cell 37: 1075-1089 (1984); Julius et al., Cell 32: 839-852 (1983), all of which are incorporated by reference in their entirety). The nucleic acid sequence encoding a processing protease may be obtained from the genes encoding Aspergillus niger Kex2, Saccharomyces cerevisiae dipeptidylaminopeptidase, Saccharomyces cerevisiae Kex2, and Yarrowia lipolytica dibasic processing endoprotease (xpr6). Any factor that is functional in the fungal host cell of choice may be used in the present invention.

[0166] Fungal cells may be transformed by a process involving protoplast formation, transformation of the protoplasts, and regeneration of the cell wall in a manner known per se. Suitable procedures for transformation of Aspergillus host cells are described in EP 238 023 and Yelton et al., Proc. Natl. Acad. Sci. (U.S.A.) 81: 1470-1474 (1984), both of which are herein incorporated by reference in their entirety. A suitable method of transforming Fusarium species is described by Malardier et al., Gene 78: 147-156 (1989), herein incorporated by reference in its entirety. Yeast may be transformed using the procedures described by Becker and Guarente, In: Abelson and Simon, (eds.), Guide to Yeast Genetics and Molecular Biology, Methods Enzymol., Volume 194, pp 182-187, Academic Press, Inc., New York; Ito et al., J. Bacteriology 153: 163 (1983); Hinnen et al., Proc. Natl. Acad. Sci. (U.S.A.) 75: 1920, (1978), all of which are herein incorporated by reference in their entirety.

[0167] The present invention also relates to methods of producing the protein or fragment thereof comprising culturing the recombinant fungal host cells under conditions conducive for expression of the protein or fragment thereof. The fungal cells of the present invention are cultivated in a nutrient medium suitable for production of the protein or fragment thereof using methods known in the art. For example, the cell may be cultivated by shake flask cultivation, small-scale or large-scale fermentation (including continuous, batch, fed-batch, or solid state fermentations) in laboratory or industrial fermentors performed in a suitable medium and under conditions allowing the protein or fragment thereof to be expressed and/or isolated. The cultivation takes place in a suitable nutrient medium comprising carbon and nitrogen sources and inorganic salts, using procedures known in the art (see, e.g., Bennett, and LaSure, eds., More Gene Manipulations in Fungi, Academic Press, CA, (1991), herein incorporated by reference in its entirety). Suitable media are available from commercial suppliers or may be prepared according to published compositions (e.g., in catalogues of the American Type Culture Collection, Manassas, Va.). If the protein or fragment thereof is secreted into the nutrient medium, a protein or fragment thereof can be recovered directly from the medium. If the protein or fragment thereof is not secreted, it is recovered from cell lysates.

[0168] The expressed protein or fragment thereof may be detected using methods known in the art that are specific for the particular protein or fragment. These detection methods may include the use of specific antibodies, formation of an enzyme product, or disappearance of an enzyme substrate. For example, if the protein or fragment thereof has enzymatic activity, an enzyme assay may be used. Alternatively, if polyclonal or monoclonal antibodies specific to the protein or fragment thereof are available, immunoassays may be employed using the antibodies to the protein or fragment thereof. The techniques of enzyme assay and immunoassay are well known to those skilled in the art.

[0169] The resulting protein or fragment thereof may be recovered by methods known in the arts For example, the protein or fragment thereof may be recovered from the nutrient medium by conventional procedures including, but not limited to, centrifugation, filtration, extraction, spray-drying, evaporation, or precipitation. The recovered protein or fragment thereof may then be further purified by a variety of chromatographic procedures, e.g., ion exchange chromatography, gel filtration chromatography, affinity chromatography, or the like.

[0170] (g) Mammalian Constructs and Transformed Mammalian Cells

[0171] The present invention also relates to methods for obtaining a recombinant mammalian host cell, comprising introducing into a mammalian host cell exogenous genetic material. The present invention also relates to a mammalian cell comprising a mammalian recombinant vector. The present invention also relates to methods for obtaining a recombinant mammalian host cell, comprising introducing into a mammalian cell exogenous genetic material.

[0172] Mammalian cell lines available as hosts for expression are known in the art and include many immortalized cell lines available from the American Type Culture Collection (ATCC, Manassas, Va.), such as HeLa cells, Chinese hamster ovary (CHO) cells, baby hamster kidney (BHK) cells, and a number of other cell lines. Suitable promoters for mammalian cells are also known in the art and include viral promoters such as that from Simian Virus 40 (SV40) (Fiers et al., Nature 273: 113 (1978), herein incorporated by reference in its entirety), Rous sarcoma virus (RSV), adenovirus (ADV), and bovine papilloma virus (BPV). Mammalian cells may also require terminator sequences and poly-A addition sequences. Enhancer sequences which increase expression may also be included, and sequences which promote amplification of the gene may also be desirable (for example methotrexate resistance genes).

[0173] Vectors suitable for replication in mammalian cells may include viral replicons, or sequences which insure integration of the appropriate sequences encoding HCV epitopes into the host genome. For example, another vector used to express foreign DNA is vaccinia virus. In this case , for example, a nucleic acid molecule encoding a Cyanidium caldarium protein homologue or fragment thereof is inserted into the vaccinia genome. Techniques for the insertion of foreign DNA into the vaccinia virus genome are known in the art, and may utilize, for example, homologous recombination. Such heterologous DNA is generally inserted into a gene which is non-essential to the virus, for example, the thymidine kinase gene (tk), which also provides a selectable marker. Plasmid vectors that greatly facilitate the construction of recombinant viruses have been described (see, for example, Mackett et al, J Virol. 49: 857 (1984); Chakrabarti et al., Mol. Cell. Biol. 5: 3403 (1985); Moss, In: Gene Transfer Vectors For Mammalian Cells (Miller and Calos, eds., Cold Spring Harbor Laboratory, N.Y., p. 10, (1987); all of which are herein incorporated by reference in their entirety). Expression of the HCV polypeptide then occurs in cells or animals which are infected with the live recombinant vaccinia virus.

[0174] The sequence to be integrated into the mammalian sequence may be introduced into the primary host by any convenient means, which includes calcium precipitated DNA, spheroplast fusion, transformation, electroporation, biolistics, lipofection, microinjection, or other convenient means. Where an amplifiable gene is being employed, the amplifiable gene may serve as the selection marker for selecting hosts into which the amplifiable gene has been introduced. Alternatively, one may include with the amplifiable gene another marker, such as a drug resistance marker, e.g. neomycin resistance (G418 in mammalian cells), hygromycin in resistance etc., or an auxotrophy marker (HIS3, TRP1, LEU2, URA3, ADE2, LYS2, etc.) for use in yeast cells.

[0175] Depending upon the nature of the modification and associated targeting construct, various techniques may be employed for identifying targeted integration. Conveniently, the DNA may be digested with one or more restriction enzymes and the fragments probed with an appropriate DNA fragment which will identify the properly sized restriction fragment associated with integration.

[0176] One may use different promoter sequences, enhancer sequences, or other sequence which will allow for enhanced levels of expression in the expression host. Thus, one may combine an enhancer from one source, a promoter region from another source, a 5′-noncoding region upstream from the initiation methionine from the same or different source as the other sequences, and the like. One may provide for an intron in the non-coding region with appropriate splice sites or for an alternative 3′-untranslated sequence or polyadenylation site. Depending upon the particular purpose of the modification, any of these sequences may be introduced, as desired.

[0177] Where selection is intended, the sequence to be integrated will have with it a marker gene, which allows for selection. The marker gene may conveniently be downstream from the target gene and may include resistance to a cytotoxic agent, e.g. antibiotics, heavy metals, or the like, resistance or susceptibility to HAT, gancyclovir, etc., complementation to an auxotrophic host, particularly by using an auxotrophic yeast as the host for the subject manipulations, or the like. The marker gene may also be on a separate DNA molecule, particularly with primary mammalian cells. Alternatively, one may screen the various transformants, due to the high efficiency of recombination in yeast, by using hybridization analysis, PCR, sequencing, or the like.

[0178] For homologous recombination, constructs can be prepared where the amplifiable gene will be flanked, normally on both sides with DNA homologous with the DNA of the target region. Depending upon the nature of the integrating DNA and the purpose of the integration, the homologous DNA will generally be within 100 kb, usually 50 kb, preferably about 25 kb, of the transcribed region of the target gene, more preferably within 2 kb of the target gene. Where modeling of the gene is intended, homology will usually be present proximal to the site of the mutation. By gene is intended the coding region and those sequences required for transcription of a mature mRNA. The homologous DNA may include the 5′-upstream region outside of the transcriptional regulatory region or comprising any enhancer sequences, transcriptional initiation sequences, adjacent sequences, or the like. The homologous region may include a portion of the coding region, where the coding region may be comprised only of an open reading frame or combination of exons and introns. The homologous region may comprise all or a portion of an intron, where all or a portion of one or more exons may also be present. Alternatively, the homologous region may comprise the 3′-region, so as to comprise all or a portion of the transcriptional termination region, or the region 3′ of this region. The homologous regions may extend over all or a portion of the target gene or be outside the target gene comprising all or a portion of the transcriptional regulatory regions and/or the structural gene.

[0179] The integrating constructs may be prepared in accordance with conventional ways, where sequences may be synthesized, isolated from natural sources, manipulated, cloned, ligated, subjected to in vitro mutagenesis, primer repair, or the like. At various stages, the joined sequences may be cloned, and analyzed by restriction analysis, sequencing, or the like. Usually during the preparation of a construct where various fragments are joined, the fragments, intermediate constructs and constructs will be carried on a cloning vector comprising a replication system functional in a prokaryotic host, e.g., E. coli, and a marker for selection, e.g., biocide resistance, complementation to an auxotrophic host, etc. Other functional sequences may also be present, such as polylinkers, for ease of introduction and excision of the construct or portions thereof, or the like. A large number of cloning vectors are available such as pBR322, the pUC series, etc. These constructs may then be used for integration into the primary mammalian host.

[0180] In the case of the primary mammalian host, a replicating vector may be used. Usually, such vector will have a viral replication system, such as SV40, bovine papilloma virus, adenovirus, or the like. The linear DNA sequence vector may also have a selectable marker for identifying transfected cells. Selectable markers include the neo gene, allowing for selection with G418, the herpes tk gene for selection with HAT medium, the gpt gene with mycophenolic acid, complementation of an auxotrophic host, etc.

[0181] The vector may or may not be capable of stable maintenance in the host. Where the vector is capable of stable maintenance, the cells will be screened for homologous integration of the vector into the genome of the host, where various techniques for curing the cells may be employed. Where the vector is not capable of stable maintenance, for example, where a temperature sensitive replication system is employed, one may change the temperature from the permissive temperature to the non-permissive temperature, so that the cells may be cured of the vector. In this case, only those cells having integration of the construct comprising the amplifiable gene and, when present, the selectable marker, will be able to survive selection.

[0182] Where a selectable marker is present, one may select for the presence of the targeting construct by means of the selectable marker. Where the selectable marker is not present, one may select for the presence of the construct by the amplifiable gene. For the neo gene or the herpes tk gene, one could employ a medium for growth of the transformants of about 0.1-1 mg/ml of G418 or may use HAT medium, respectively. Where DHFR is the amplifiable gene, the selective medium may include from about 0.01-0.5 mu M of methotrexate or be deficient in glycine-hypoxanthine-thymidine and have dialysed serum (GHT media).

[0183] The DNA can be introduced into the expression host by a variety of techniques that include calcium phosphate/DNA co-precipitates, microinjection of DNA into the nucleus, electroporation, yeast protoplast fusion with intact cells, transfection, polycations, e.g., polybrene, polyornithine, etc., or the like. The DNA may be single or double stranded DNA, linear or circular. The various techniques for transforming mammalian cells are well known (see Keown et al., Methods Enzymol. (1989), Keown et al., Methods Enzymol. 185:527-537 (1990); Mansour et al., Nature 336:348-352, (1988); all of which are herein incorporated by reference in their entirety).

[0184] (h) Insect Constructs and Transformed Insect Cells

[0185] The present invention also relates to an insect recombinant expression vectors comprising exogenous genetic material. The present invention also relates to an insect cell comprising an insect recombinant vector. The present invention also relates to methods for obtaining a recombinant insect host cell, comprising introducing into an insect cell exogenous genetic material.

[0186] The insect recombinant vector may be any vector which can be conveniently subjected to recombinant DNA procedures and can bring about the expression of the nucleic acid sequence. The choice of a vector will typically depend on the compatibility of the vector with the insect host cell into which the vector is to be introduced. The vector may be a linear or a closed circular plasmid. The vector system may be a single vector or plasmid or two or more vectors or plasmids which together contain the total DNA to be introduced into the genome of the insect host. In addition, the insect vector may be an expression vector. Nucleic acid molecules can be suitable inserted into a replication vector for expression in the insect cell under a suitable promoter for insect cells. Many vectors are available for this purpose, and selection of the appropriate vector will depend mainly on the size of the nucleic acid molecule to be inserted into the vector and the particular host cell to be transformed with the vector. Each vector contains various components depending on its function (amplification of DNA or expression of DNA) and the particular host cell with which it is compatible. The vector components for insect cell transformation generally include, but not limited to, one or more of the following: a signal sequence, and origin of replication, one or more marker genes, and an inducible promoter.

[0187] The insect vector may be an autonomously replicating vector, i.e., a vector which exists as an extrachromosomal entity, the replication of which is independent of chromosomal replication, e.g., a plasmid, an extrachromosomal element, a minichromosome, or an artificial chromosome. The vector may contain any means for assuring self-replication. Alternatively, the vector may be one which, when introduced into the insect cell, is integrated into the genome and replicated together with the chromosome(s) into which it has been integrated. For integration, the vector may rely on the nucleic acid sequence of the vector for stable integration of the vector into the genome by homologous or nonhomologous recombination. Alternatively, the vector may contain additional nucleic acid sequences for directing integration by homologous recombination into the genome of the insect host. The additional nucleic acid sequences enable the vector to be integrated into the host cell genome at a precise location(s) in the chromosome(s). To increase the likelihood of integration at a precise location, there should be preferably two nucleic acid sequences which individually contain a sufficient number of nucleic acids, preferably 400 bp to 1500 bp, more preferably 800 bp to 1000 bp, which are highly homologous with the corresponding target sequence to enhance the probability of homologous recombination. These nucleic acid sequences may be any sequence that is homologous with a target sequence in the genome of the insect host cell, and, furthermore, may be non-encoding or encoding sequences.

[0188] Baculovirus expression vectors (BEVs) have become important tools for the expression of foreign genes, both for basic research and for the production of proteins with direct clinical applications in human and veterinary medicine (Doerfler, Curr. Top. Microbiol. Immunol. 131: 51-68 (1968); Luckow and Summers, Bio/Technology 6: 47-55 (1988a); Miller, Annual Review of Microbiol. 42: 177-199 (1988); Summers, Curr. Comm. Molecular Biology, Cold Spring Harbor Press, Cold Spring Harbor, N.Y. (1988); all of which are herein incorporated by reference in their entirety). BEVs are recombinant insect viruses in which the coding sequence for a chosen foreign gene has been inserted behind a baculovirus promoter in place of the viral gene, e.g., polyhedrin (Smith and Summers, U.S. Pat. No., 4,745,051, herein incorporated by reference in its entirety).

[0189] The use of baculovirus vectors relies upon the host cells being derived from Lepidopteran insects such as Spodoptera frugiperda or Trichoplusia ni. The preferred Spodoptera frugiperda cell line is the cell line Sf9. The Spodoptera frugiperda Sf9 cell line was obtained from American Type Culture Collection (Manassas, Va.) and is assigned accession number ATCC CRL 1711 (Summers and Smith, A Manual of Methods for Baculovirus Vectors and Insect Cell Culture Procedures, Texas Ag. Exper. Station Bulletin No. 1555 (1988), herein incorporated by reference in its entirety). Other insect cell systems, such as the silkworm B. mori may also be used.

[0190] The proteins expressed by the BEVs are, therefore, synthesized, modified and transported in host cells derived from Lepidopteran insects. Most of the genes that have been inserted and produced in the baculovirus expression vector system have been derived from vertebrate species. Other baculovirus genes in addition to the polyhedrin promoter may be employed to advantage in a baculovirus expression system. These include immediate-early (alpha), delayed-early (beta), late (gamma), or very late (delta), according to the phase of the viral infection during which they are expressed. The expression of these genes occurs sequentially, probably as the result of a “cascade” mechanism of transcriptional regulation. (Guarino and Summers, J Virol. 57:563-571 (1986); Guarino and Summers, J. Virol. 61:2091-2099 (1987); Guarino and Summers, Virol. 162:444-451 (1988); all of which are herein incorporated by reference in their entirety).

[0191] Insect recombinant vectors are useful as an intermediates for the infection or transformation of insect cell systems. For example, an insect recombinant vector containing a nucleic acid molecule encoding a baculovirus transcriptional promoter followed downstream by an insect signal DNA sequence is capable of directing the secretion of the desired biologically active protein from the insect cell. The vector may utilize a baculovirus transcriptional promoter region derived from any of the over 500 baculoviruses generally infecting insects, such as for example the Orders Lepidoptera, Diptera, Orthoptera, Coleoptera and Hymenoptera, including for example but not limited to the viral DNAs of Autographa californica MNPV, Bombyx mori NPV, Trichoplusia ni MNPV, Rachiplusia ou MNP V or Galleria mellonella MNPV, wherein said baculovirus transcriptional promoter is a baculovirus immediate-early gene IEI or IEN promoter; an immediate-early gene in combination with a baculovirus delayed-early gene promoter region selected from the group consisting of 39K and a HindIII-k fragment delayed-early gene; or a baculovirus late gene promoter. The immediate-early or delayed-early promoters can be enhanced with transcriptional enhancer elements. The insect signal DNA sequence may code for a signal peptide of a Lepidopteran adipokinetic hormone precursor or a signal peptide of the Manduca sexta adipokinetic hormone precursor (Summers, U.S. Pat. No. 5,155,037; herein incorporated by reference in its entirety). Other insect signal DNA sequences include a signal peptide of the Orthoptera Schistocerca gregaria locust adipokinetic hormone precurser and the Drosophila melanogaster cuticle genes CP1, CP2, CP3 or CP4 or for an insect signal peptide having substantially a similar chemical composition and function (Summers, U.S. Pat. No. 5,155,037).

[0192] Insect cells are distinctly different from animal cells. Insects have a unique life cycle and have distinct cellular properties such as the lack of intracellular plasminogen activators in insect cells which are present in vertebrate cells. Another difference is the high expression levels of protein products ranging from 1 to greater than 500 mg/liter and the ease at which cDNA can be cloned into cells (Frasier, In Vitro Cell. Dev. Biol. 25:225 (1989); Summers and Smith, In: A Manual of Methods for Baculovirus Vectors and Insect Cell Culture Procedures, Texas Ag. Exper. Station Bulletin No. 1555 (1988), both of which are incorporated by reference in their entirety).

[0193] Recombinant protein expression in insect cells is achieved by viral infection or stable transformation. For viral infection, the desired gene is cloned into baculovirus at the site of the wild-type polyhedron gene (Webb and Summers, Technique 2:173 (1990); Bishop and Posse, Adv. Gene Technol. 1:55 (1990); both of which are incorporated by reference in their entirety). The polyhedron gene is a component of a protein coat in occlusions which encapsulate virus particles. Deletion or insertion in the polyhedron gene results the failure to form occlusion bodies. Occlusion negative viruses are morphologically different from occlusion positive viruses and enable one skilled in the art to identify and purify recombinant viruses.

[0194] The vectors of present invention preferably contain one or more selectable markers which permit easy selection of transformed cells. A selectable marker is a gene the product of which provides, for example biocide or viral resistance, resistance to heavy metals, prototrophy to auxotrophs, and the like. Selection may be accomplished by co-transformation, e.g., as described in WO 91/17243, a nucleic acid sequence of the present invention may be operably linked to a suitable promoter sequence. The promoter sequence is a nucleic acid sequence which is recognized by the insect host cell for expression of the nucleic acid sequence. The promoter sequence contains transcription and translation control sequences which mediate the expression of the protein or fragment thereof. The promoter may be any nucleic acid sequence which shows transcriptional activity in the insect host cell of choice and may be obtained from genes encoding polypeptides either homologous or heterologous to the host cell.

[0195] For example, a nucleic acid molecule encoding a Cyanidium caldarium protein homologue or fragment thereof may also be operably linked to a suitable leader sequence. A leader sequence is a nontranslated region of a mRNA which is important for translation by the insect host. The leader sequence is operably linked to the 5′ terminus of the nucleic acid sequence encoding the protein or fragment thereof. The leader sequence may be native to the nucleic acid sequence encoding the protein or fragment thereof or may be obtained from foreign sources. Any leader sequence which is functional in the insect host cell of choice may be used in the present invention.

[0196] A polyadenylation sequence may also be operably linked to the 3′ terminus of the nucleic acid sequence of the present invention. The polyadenylation sequence is a sequence which when transcribed is recognized by the insect host to add polyadenosine residues to transcribed mRNA. The polyadenylation sequence may be native to the nucleic acid sequence encoding the protein or fragment thereof or may be obtained from foreign sources. Any polyadenylation sequence which is functional in the fungal host of choice may be used in the present invention.

[0197] To avoid the necessity of disrupting the cell to obtain the protein or fragment thereof, and to minimize the amount of possible degradation of the expressed polypeptide within the cell, it is preferred that expression of the polypeptide gene gives rise to a product secreted outside the cell. To this end, the protein or fragment thereof of the present invention may be linked to a signal peptide linked to the amino terminus of the protein or fragment thereof. A signal peptide is an amino acid sequence which permits the secretion of the protein or fragment thereof from the insect host into the culture medium. The signal peptide may be native to the protein or fragment thereof of the invention or may be obtained from foreign sources. The 5′ end of the coding sequence of the nucleic acid sequence of the present invention may inherently contain a signal peptide coding region naturally linked in translation reading frame with the segment of the coding region which encodes the secreted protein or fragment thereof.

[0198] At present, a mode of achieving secretion of a foreign gene product in insect cells is by way of the foreign gene's native signal peptide. Because the foreign genes are usually from non-insect organisms, their signal sequences may be poorly recognized by insect cells, and hence, levels of expression may be suboptimal. However, the efficiency of expression of foreign gene products seems to depend primarily on the characteristics of the foreign protein. On average, nuclear localized or non-structural proteins are most highly expressed, secreted proteins are intermediate, and integral membrane proteins are the least expressed. One factor generally affecting the efficiency of the production of foreign gene products in a heterologous host system is the presence of native signal sequences (also termed presequences, targeting signals, or leader sequences) associated with the foreign gene. The signal sequence is generally coded by a DNA sequence immediately following (5′ to 3′) the translation start site of the desired foreign gene.

[0199] The expression dependence on the type of signal sequence associated with a gene product can be represented by the following example: If a foreign gene is inserted at a site downstream from the translational start site of the baculovirus polyhedrin gene so as to produce a fusion protein (containing the N-terminus of the polyhedrin structural gene), the fused gene is highly expressed. But less expression is achieved when a foreign gene is inserted in a baculovirus expression vector immediately following the transcriptional start site and totally replacing the polyhedrin structural gene.

[0200] Insertions into the region -50 to -1 significantly alter (reduce) steady state transcription which, in turn, reduces translation of the foreign gene product. Use of the pVL941 vector optimizes transcription of foreign genes to the level of the polyhedrin gene transcription. Even though the transcription of a foreign gene may be optimal, optimal translation may vary because of several factors involving processing: signal peptide recognition, mRNA and ribosome binding, glycosylation, disulfide bond formation, sugar processing, oligomerization, for example.

[0201] The properties of the insect signal peptide are expected to be more optimal for the efficiency of the translation process in insect cells than those from vertebrate proteins. This phenomenon can generally be explained by the fact that proteins secreted from cells are synthesized as precursor molecules containing hydrophobic N-terminal signal peptides. The signal peptides direct transport of the select protein to its target membrane and are then cleaved by a peptidase on the membrane, such as the endoplasmic reticulum, when the protein passes through it.

[0202] Another exemplary insect signal sequence is the sequence encoding for Drosophila cuticle proteins such as CP1, CP2, CP3 or CP4 (Summers, U.S. Pat. No. 5,278,050; herein incorporated by reference in its entirety). Most of the 9 kb region of the Drosophila genome contains genes for the cuticle proteins has been sequenced. Four of the five cuticle genes contain a signal peptide coding sequence interrupted by a short intervening sequence (about 60 base pairs) at a conserved site. Conserved sequences occur in the 5′ mRNA untranslated region, in the adjacent 35 base pairs of upstream flanking sequence and at −200 base pairs from the mRNA start position in each of the cuticle genes.

[0203] Standard methods of insect cell culture, cotransfection and preparation of plasmids are set forth in Summers and Smith (Summers and Smith, A Manual of Methods for Baculovirus Vectors and Insect Cell Culture Procedures, Texas Agricultural Experiment Station Bulletin No. 1555, Texas A&M University (1987)). Procedures for the cultivation of viruses and cells are described in Volkman and Summers, J. Virol 19: 820-832 (1975) and Volkman et al., J. Virol 19: 820-832 (1976); both of which are herein incorporated by reference in their entirety.

[0204] (i) Bacterial Constructs and Transformed Bacterial Cells

[0205] The present invention also relates to a bacterial recombinant vector comprising exogenous genetic material. The present invention also relates to a bacteria cell comprising a bacterial recombinant vector. The present invention also relates to methods for obtaining a recombinant bacteria host cell, comprising introducing into a bacterial host cell exogenous genetic material.

[0206] The bacterial recombinant vector may be any vector which can be conveniently subjected to recombinant DNA procedures. The choice of a vector will typically depend on the compatibility of the vector with the bacterial host cell into which the vector is to be introduced. The vector may be a linear or a closed circular plasmid. The vector system may be a single vector or plasmid or two or more vectors or plasmids which together contain the total DNA to be introduced into the genome of the bacterial host. In addition, the bacterial vector may be an expression vector. Nucleic acid molecules encoding Cyanidium caldarium protein homologues or fragments thereof can, for example, be suitably inserted into a replicable vector for expression in the bacterium under the control of a suitable promoter for bacteria. Many vectors are available for this purpose, and selection of the appropriate vector will depend mainly on the size of the nucleic acid to be inserted into the vector and the particular host cell to be transformed with the vector. Each vector contains various components depending on its function (amplification of DNA or expression of DNA) and the particular host cell with which it is compatible. The vector components for bacterial transformation generally include, but are not limited to, one or more of the following: a signal sequence, an origin of replication, one or more marker genes, and an inducible promoter.

[0207] In general, plasmid vectors containing replicon and control sequences that are derived from species compatible with the host cell are used in connection with bacterial hosts. The vector ordinarily carries a replication site, as well as marking sequences that are capable of providing phenotypic selection in transformed cells. For example, E. coli is typically transformed using pBR322, a plasmid derived from an E. coli species (see, e.g., Bolivar et al., Gene 2: 95 (1977); herein incorporated by reference in its entirety). pBR322 contains genes for ampicillin and tetracycline resistance and thus provides easy means for identifying transformed cells. The pBR322 plasmid, or other microbial plasmid or phage, also generally contains, or is modified to contain, promoters that can be used by the microbial organism for expression of the selectable marker genes.

[0208] Nucleic acid molecules encoding Cyanidium caldarium protein homologues or fragments thereof may be expressed not only directly, but also as a fusion with another polypeptide, preferably a signal sequence or other polypeptide having a specific cleavage site at the N-terminus of the mature polypeptide. In general, the signal sequence may be a component of the vector, or it may be a part of the polypeptide DNA that is inserted into the vector. The heterologous signal sequence selected should be one that is recognized and processed (i.e., cleaved by a signal peptidase) by the host cell. For bacterial host cells that do not recognize and process the native polypeptide signal sequence, the signal sequence is substituted by a bacterial signal sequence selected, for example, from the group consisting of the alkaline phosphatase, penicillinase, lpp, or heat-stable enterotoxin II leaders.

[0209] Both expression and cloning vectors contain a nucleic acid sequence that enables the vector to replicate in one or more selected host cells. Generally, in cloning vectors this sequence is one that enables the vector to replicate independently of the host chromosomal DNA, and includes origins of replication or autonomously replicating sequences. Such sequences are well known for a variety of bacteria. The origin of replication from the plasmid pBR322 is suitable for most Gram-negative bacteria.

[0210] Expression and cloning vectors also generally contain a selection gene, also termed a selectable marker. This gene encodes a protein necessary for the survival or growth of transformed host cells grown in a selective culture medium. Host cells not transformed with the vector containing the selection gene will not survive in the culture medium. Typical selection genes encode proteins that (a) confer resistance to antibiotics or other toxins, e.g., ampicillin, neomycin, methotrexate, or tetracycline, (b) complement auxotrophic deficiencies, or (c) supply critical nutrients not available from complex media, e.g., the gene encoding D-alanine racemase for Bacilli. One example of a selection scheme utilizes a drug to arrest growth of a host cell. Those cells that are successfully transformed with a heterologous gene homologue or fragment thereof produce a protein conferring drug resistance and thus survive the selection regimen.

[0211] The expression vector for producing a polypeptide can also contains an inducible promoter that is recognized by the host bacterial organism and is operably linked to the nucleic acid encoding, for example, a Cyanidium caldarium protein homologue or fragment thereof of interest. Inducible promoters suitable for use with bacterial hosts include the beta-lactamase and lactose promoter systems (Chang et al., Nature 275: 615 (1978); Goeddel et al., Nature 281: 544 (1979); both of which are herein incorporated by reference in their entirety), the arabinose promoter system (Guzman et al., J. Bacteriol. 174: 7716-7728 (1992); herein incorporated by reference in its entirety), alkaline phosphatase, a tryptophan (trp) promoter system (Goeddel, Nucleic Acids Res. 8: 4057 (1980); EP 36,776; both of which are herein incorporated by reference in their entirety) and hybrid promoters such as the tac promoter (deBoer et al., Proc. Natl. Acad. Sci. USA 80: 21-25 (1983); herein incorporated by reference in its entirety). However, other known bacterial inducible promoters are suitable (Siebenlist et al., Cell 20:269 (1980); herein incorporated by reference in its entirety).

[0212] Promoters for use in bacterial systems also generally contain a Shine-Dalgarno (S.D.) sequence operably linked to the DNA encoding the polypeptide of interest. The promoter can be removed from the bacterial source DNA by restriction enzyme digestion and inserted into the vector containing the desired DNA.

[0213] Construction of suitable vectors containing one or more of the above-listed components employs standard ligation techniques. Isolated plasmids or DNA fragments are cleaved, tailored, and re-ligated in the form desired to generate the plasmids required. Examples of available bacterial expression vectors include, but are not limited to, the multifunctional E. coli cloning and expression vectors such as Bluescript Registered TM (Stratagene, La Jolla, Calif.), in which, for example, encoding a Cyanidium caldarium protein homologue or fragment thereof, may be ligated into the vector in frame with sequences for the amino-terminal Met and the subsequent 7 residues of beta-galactosidase so that a hybrid protein is produced; pIN vectors (Van Heeke and Schuster J. Biol. Chem. 264: 5503-5509 (1989). Herein incorporated by reference in its entirety); and the like. pGEX vectors (Promega, Madison Wis.) may also be used to express foreign polypeptides as fusion proteins with glutathione S-transferase (GST). In general, such fusion proteins are soluble and can easily be purified from lysed cells by adsorption to glutathione-agarose beads followed by elution in the presence of free glutathione. Proteins made in such systems are designed to include heparin, thrombin or factor XA protease cleavage sites so that the cloned polypeptide of interest can be released from the GST moiety at will.

[0214] Suitable host bacteria for a bacterial vector include archaebacteria and eubacteria, especially eubacteria, and most preferably Enterobacteriaceae. Examples of useful bacteria include Escherichia, Enterobacter, Azotobacter, Erwinia, Bacillus, Pseudomonas, Klebsiella, Proteus, Salmonella, Serratia, Shigella, Rhizobia, Vitreoscilla, and Paracoccus. Suitable E. coli hosts include E. coli W3110 (American Type Culture Collection (ATCC), Manassas, Va.) 27,325), E. coli 294 (ATCC 31,446), E. coli B, and E. coli X1776 (ATCC 31,537). These examples are illustrative rather than limiting. Mutant cells of any of the above-mentioned bacteria may also be employed. It is, of course, necessary to select the appropriate bacteria taking into consideration replicability of the replicon in the cells of a bacterium. For example, E. coli, Serratia, or Salmonella species can be suitably used as the host when well known plasmids such as pBR322, pBR325, pACYC177, or pKN410 are used to supply the replicon. E. coli strain W3110 is a preferred host or parent host because it is a common host strain for recombinant DNA product fermentations. Preferably, the host cell should secrete minimal amounts of proteolytic enzymes.

[0215] Host cells are transfected and preferably transformed with the above-described vectors and cultured in conventional nutrient media modified as appropriate for inducing promoters, selecting transformants, or amplifying the genes encoding the desired sequences.

[0216] Numerous methods of transfection are known to the ordinarily skilled artisan, for example, calcuim phosphate and electroporation. Depending on the host cell used, transformation is done using standard techniques appropriate to such cells. The calcium treatment employing calcium chloride, as described in section 1.82 of Sambrook et al., Molecular Cloning: A Laboratory Manual, New York: Cold Spring Harbor Laboratory Press, (1989), is generally used for bacterial cells that contain substantial cell-wall barriers. Another method for transformation employs polyethylene glycol/DMSO, as described in Chung and Miller (Chung and Miller, Nucleic Acids Res. 16: 3580 (1988); herein incorporated by reference in its entirety). Yet another method is the use of the technique termed electroporation.

[0217] Bacterial cells used to produce the polypeptide of interest for purposes of this invention are cultured in suitable media in which the promoters for the nucleic acid encoding the heterologous polypeptide can be artificially induced as described generally, e.g., in Sambrook et al., Molecular Cloning: A Laboratory Manual, New York: Cold Spring Harbor Laboratory Press, (1989). Examples of suitable media are given in U.S. Pat. Nos. 5,304,472 and 5,342,763; both of which are incorporated by reference in their entirety.

[0218] (j) Computer Media

[0219] The nucleotide sequence provided in SEQ ID NO:1, through SEQ ID NO:5674 or fragment thereof, or complement thereof, or a nucleotide sequence at least 90% identical, preferably 95%, identical even more preferably 99% or 100% identical to the sequence provided in SEQ ID NO:1 through SEQ ID NO:5674 or fragment thereof, or complement thereof, can be “provided” in a variety of mediums to facilitate use. Such a medium can also provide a subset thereof in a form that allows a skilled artisan to examine the sequences.

[0220] In one application of this embodiment, a nucleotide sequence of the present invention can be recorded on computer readable media. As used herein, “computer readable media” refers to any medium that can be read and accessed directly by a computer. Such media include, but are not limited to: magnetic storage media, such as floppy discs, hard disc, storage medium, and magnetic tape: optical storage media such as CD-ROM; electrical storage media such as RAM and ROM; and hybrids of these categories such as magnetic/optical storage media. A skilled artisan can readily appreciate how any of the presently known computer readable mediums can be used to create a manufacture comprising computer readable medium having recorded thereon a nucleotide sequence of the present invention.

[0221] As used herein, “recorded” refers to a process for storing information on computer readable medium. A skilled artisan can readily adopt any of the presently known methods for recording information on computer readable medium to generate media comprising the nucleotide sequence information of the present invention. A variety of data storage structures are available to a skilled artisan for creating a computer readable medium having recorded thereon a nucleotide sequence of the present invention. The choice of the data storage structure will generally be based on the means chosen to access the stored information. In addition, a variety of data processor programs and formats can be used to store the nucleotide sequence information of the present invention on computer readable medium. The sequence information can be represented in a word processing text file, formatted in commercially-available software such as WordPerfect and Microsoft Word, or represented in the form of an ASCII file, stored in a database application, such as DB2, Sybase, Oracle, or the like. A skilled artisan can readily adapt any number of data processor structuring formats (e.g. text file or database) in order to obtain computer readable medium having recorded thereon the nucleotide sequence information of the present invention.

[0222] By providing one or more of nucleotide sequences of the present invention, a skilled artisan can routinely access the sequence information for a variety of purposes. Computer software is publicly available which allows a skilled artisan to access sequence information provided in a computer readable medium. The examples which follow demonstrate how software which implements the BLAST (Altschul et al., J. Mol. Biol. 215: 403-410 (1990), herein incorporated by reference in its entirety) and BLAZE (Brutlag, et al., Comp. Chem. 17: 203-207 (1993), herein incorporated by reference in its entirety) search algorithms on a Sybase system can be used to identify open reading frames (ORFs) within the genome that contain homology to ORFs or proteins from other organisms. Such ORFs are protein-encoding fragments within the sequences of the present invention and are useful in producing commercially important proteins such as enzymes used in amino acid biosynthesis, metabolism, transcription, translation, RNA processing, nucleic acid and a protein degradation, protein modification, and DNA replication, restriction, modification, recombination, and repair.

[0223] The present invention further provides systems, particularly computer-based systems, which contain the sequence information described herein. Such systems are designed to identify commercially important fragments of the nucleic acid molecule of the present invention. As used herein, “a computer-based system” refers to the hardware means, software means, and data storage means used to analyze the nucleotide sequence information of the present invention. The minimum hardware means of the computer-based systems of the present invention comprises a central processing unit (CPU), input means, output means, and data storage means. A skilled artisan can readily appreciate that any one of the currently available computer-based system are suitable for use in the present invention.

[0224] As indicated above, the computer-based systems of the present invention comprise a data storage means having stored therein a nucleotide sequence of the present invention and the necessary hardware means and software means for supporting and implementing a search means. As used herein, “data storage means” refers to memory that can store nucleotide sequence information of the present invention, or a memory access means which can access manufactures having recorded thereon the nucleotide sequence information of the present invention. As used herein, “search means” refers to one or more programs which are implemented on the computer-based system to compare a target sequence or target structural motif with the sequence information stored within the data storage means. Search means are used to identify fragments or regions of the sequence of the present invention that match a particular target sequence or target motif. A variety of known algorithms are disclosed publicly and a variety of commercially available software for conducting search means are available can be used in the computer-based systems of the present invention. Examples of such software include, but are not limited to, MacPattern (EMBL), BLASTIN and BLASTIX (NCBIA). One of the available algorithms or implementing software packages for conducting homology searches can be adapted for use in the present computer-based systems.

[0225] The most preferred sequence length of a target sequence is from about 10 to 100 amino acids or from about 30 to 300 nucleotide residues. However, it is well recognized that during searches for commercially important fragments of the nucleic acid molecules of the present invention, such as sequence fragments involved in gene expression and protein processing, may be of shorter length.

[0226] As used herein, “a target structural motif,” or “target motif,” refers to any rationally selected sequence or combination of sequences in which the sequences the sequence(s) are chosen based on a three-dimensional configuration which is formed upon the folding of the target motif. There are a variety of target motifs known in the art. Protein target motifs include, but are not limited to, enzymatic active sites and signal sequences. Nucleic acid target motifs include, but are not limited to, promoter sequences, cis elements, hairpin structures and inducible expression elements (protein binding sequences).

[0227] Thus, the present invention further provides an input means for receiving a target sequence, a data storage means for storing the target sequences of the present invention sequence identified using a search means as described above, and an output means for outputting the identified homologous sequences. A variety of structural formats for the input and output means can be used to input and output information in the computer-based systems of the present invention. A preferred format for an output means ranks fragments of the sequence of the present invention by varying degrees of homology to the target sequence or target motif. Such presentation provides a skilled artisan with a ranking of sequences which contain various amounts of the target sequence or target motif and identifies the degree of homology contained in the identified fragment.

[0228] A variety of comparing means can be used to compare a target sequence or target motif with the data storage means to identify sequence fragments sequence of the present invention. For example, implementing software which implement the BLAST and BLAZE algorithms (Altschul et al., J. Mol. Biol. 215: 403-410 (1990), herein incorporated by reference in its entirety) can be used to identify open frames within the nucleic acid molecules of the present invention. A skilled artisan can readily recognize that any one of the publicly available homology search programs can be used as the search means for the computer-based systems of the present invention.

[0229] Uses of the Agents of the Present Invention

[0230] Nucleic acid molecules and fragments thereof of the present invention may be employed to obtain other nucleic acid molecules from the same species. Such nucleic acid molecules include the nucleic acid molecules that encode the complete coding sequence of a protein and promoters and flanking sequences of such molecules. In addition, such nucleic acid molecules include nucleic acid molecules that encode for other isozymes or gene family members. Such molecules can be readily obtained by using the above-described nucleic acid molecules or fragments thereof to screen cDNA or genomic libraries obtained from Cyanidium caldarium. Methods for forming such libraries are well known in the art.

[0231] Nucleic acid molecules and fragments thereof of the present invention may also be employed to obtain other nucleic acid molecules such as nucleic acid homologues. Such homologues include the nucleic acid molecules that encode, in whole or in part, protein homologues of other species, plants or other organisms. Such molecules can be readily obtained by using the above-described nucleic acid molecules or fragments thereof to screen cDNA or genomic libraries. Methods for forming such libraries are well known in the art. Such homologue molecules may differ in their nucleotide sequences from those found in one or more of SEQ ID NO:1 through SEQ ID NO:5674 or complements thereof because complete complementarity is not needed for stable hybridization. The nucleic acid molecules of the present invention therefore also include molecules that, although capable of specifically hybridizing with the nucleic acid molecules may lack “complete complementarity.” In a particular embodiment, methods or 3′ or 5′ RACE may be used to obtain such sequences (Frohman, M. A. et al., Proc. Natl. Acad. Sci. (U.S.A.) 85:8998-9002 (1988); Ohara, O. et al., Proc. Natl. Acad. Sci. (U.S.A.) 86:5673-5677 (1989), both of which are herein incorporated by reference in their entirety).

[0232] Any of a variety of methods may be used to obtain one or more of the above-described nucleic acid molecules (Zamechik et al., Proc. Natl. Acad. Sci. (U.S.A.) 83: 4143-4146 (1986); Goodchild et al., Proc. Natl. Acad. Sci. (U.S.A.) 85: 5507-5511 (1988); Wickstrom et al., Proc. Natl. Acad. Sci. (U.S.A) 85: 1028-1032 (1988),; Holt et al., Molec. Cell. Biol. 8: 963-973 (1988); Gerwirtz et al., Science 242: 1303-1306 (1988); Anfossi et al., Proc. Natl. Acad. Sci. (U.S.A.) 86: 3379-3383 (1989); Becker et al., EMBO J. 8: 3685-3691 (1989); all of which are herein incorporated by reference in their entirety). Automated nucleic acid synthesizers may be employed for this purpose. In lieu of such synthesis, the disclosed nucleic acid molecules may be used to define a pair of primers that can be used with the polymerase chain reaction (Mullis et al., Cold Spring Harbor Symp. Quant. Biol. 51: 263-273 (1986); Erlich et al., European Patent 50,424; European Patent 84,796, European Patent 258,017, European Patent 237,362; Mullis, European Patent 201,184; Mullis et al., U.S. Pat. No. 4,683,202; Erlich, U.S. Pat. No. 4,582,788; and Saiki, R. et al., U.S. Pat. No. 4,683,194, all of which are herein incorporated by reference in their entirety) to amplify and obtain any desired nucleic acid molecule or fragment.

[0233] Promoter sequence(s) and other genetic elements including but not limited to transcriptional regulatory elements associated with one or more of the disclosed nucleic acid sequences can also be obtained using the disclosed nucleic acid sequences provided herein. In one embodiment, such sequences are obtained by incubating EST nucleic acid molecules or preferably fragments thereof with members of genomic libraries and recovering clones that hybridize to the EST nucleic acid molecule or fragment thereof. In a second embodiment, methods of “chromosome walking,” or inverse PCR may be used to obtain such sequences (Frohman, et al., Proc. Natl. Acad. Sci. (U.S.A.) 85:8998-9002 (1988); Ohara, et al., Proc. Natl. Acad. Sci. (U.S.A.) 86: 5673-5677 (1989); Pang et al., Biotechniques, 22(6); 1046-1048 (1977); Huang et al., Methods Mol. Biol. 69: 89-96 (1977); Hartl et al., Methods Mol. Biol. 58: 293-301 (1996), all of which are herein incorporated by reference in their entirety). In one embodiment, the disclosed ESTs are used to identify cDNAs whose analogous genes contain promoters with desirable expression patterns. Isolation and functional analysis of the 5′ flanking promoter sequences of these genes from genomic libraries, for example, using genomic screening methods and PCR techniques would result in the isolation of useful promoters and transcriptional regulatory elements. These methods are known to those of skill in the art and have been described (See for example Birren et al., Genome Analysis:Analyzing DNA, 1, (1997), Cold Spring Harbor Laboratory Press, Cold Spring Harbor, N.Y., herein incorporated by reference in its entirety). Promoters obtained utilizing the ESTs of the present invention could also be modified to affect their control characteristics. Examples of such modifications would include but are not limited to enhancer sequences as reported by Kay et al., Science 236:1299 (1987), herein incorporated by reference in its entirety.

[0234] In an aspect of the present invention, one or more of the agents of the present invention may be used to detecting the presence, absence or level of a organism, preferably a red alga and more preferably unicellular red algae, and even more preferably Cyanidium caldarium in a sample. In another aspect of the present invention, one or more of the nucleic molecules of the present invention are used to determine the level (i.e., the concentration of mRNA in a sample, etc.) or pattern (i.e., the kinetics of expression, rate of decomposition, stability profile, etc.) of the expression encoded in part or whole by one or more of the nucleic acid molecule of the present invention (collectively, the “Expression Response” of a cell or tissue). As used herein, the Expression Response manifested by a cell or tissue is said to be “altered” if it differs from the Expression Response of cells or tissues of organisms not exhibiting the phenotype. To determine whether a Expression Response is altered, the Expression Response manifested by the cell or tissue of the organism exhibiting the phenotype is compared with that of a similar cell or tissue sample of a organism not exhibiting the phenotype. As will be appreciated, it is not necessary to re-determine the Expression Response of the cell or tissue sample of organisms not exhibiting the phenotype each time such a comparison is made; rather, the Expression Response of a particular organism may be compared with previously obtained values of normal organism. As used herein, the phenotype of the organism is any of one or more characteristics of an organism.

[0235] In one sub-aspect, such an analysis is conducted by determining the presence and/or identity of polymorphism(s) by one or more of the nucleic acid molecules of the present invention and more specifically, one or more of the EST nucleic acid molecule or fragment thereof which are associated with phenotype, or a predisposition to phenotype.

[0236] Any of a variety of molecules can be used to identify such polymorphism(s). In one embodiment, one or more of the EST nucleic acid molecules (or a sub-fragment thereof) may be employed as a marker nucleic acid molecule to identify such polymorphism(s). Alternatively, such polymorphisms can be detected through the use of a marker nucleic acid molecule or a marker protein that is genetically linked to (i.e., a polynucleotide that co-segregates with) such polymorphism(s).

[0237] In an alternative embodiment, such polymorphisms can be detected through the use of a marker nucleic acid molecule that is physically linked to such polymorphism(s). For this purpose, marker nucleic acid molecules comprising a nucleotide sequence of a polynucleotide located within 1 mb of the polymorphism(s), and more preferably within 100 kb of the polymorphism(s), and most preferably within 10 kb of the polymorphism(s) can be employed.

[0238] The genomes of animals and plants naturally undergo spontaneous mutation in the course of their continuing evolution (Gusella, Ann. Rev. Biochem. 55:831-854 (1986), herein incorporated by reference in its entirety). A “polymorphism” is a variation or difference in the sequence of the gene or its flanking regions that arises in some of the members of a species. The variant sequence and the “original” sequence co-exist in the species' population. In some instances, such co-existence is in stable or quasi-stable equilibrium.

[0239] A polymorphism is thus said to be “allelic,” in that, due to the existence of the polymorphism, some members of a species may have the original sequence (i.e., the original “allele”) whereas other members may have the variant sequence (i.e., the variant “allele”). In the simplest case, only one variant sequence may exist, and the polymorphism is thus said to be di-allelic. In other cases, the species' population may contain multiple alleles, and the polymorphism is termed tri-allelic, etc. A single gene may have multiple different unrelated polymorphisms. For example, it may have a di-allelic polymorphism at one site, and a multi-allelic polymorphism at another site.

[0240] The variation that defines the polymorphism may range from a single nucleotide variation to the insertion or deletion of extended regions within a gene. In some cases, the DNA sequence variations are in regions of the genome that are characterized by short tandem repeats (STRs) that include tandem di- or tri-nucleotide repeated motifs of nucleotides. Polymorphisms characterized by such tandem repeats are referred to as “variable number tandem repeat” (“VNTR”) polymorphisms. VNTRs have been used in identity analysis (Weber, U.S. Pat. No. 5,075,217; Armour, et al., FEBS Lett. 307:113-115 (1992); Jones, et al., Eur. J. Haematol. 39:144-147 (1987); Horn, et al., PCT Application WO91/14003; Jeffreys, European Patent Application 370,719; Jeffreys, U.S. Pat. No. 5,175,082; Jeffreys. et al., Amer. J Hum. Genet. 39:11-24 (1986); Jeffreys. et al., Nature 316:76-79 (1985); Gray, et al., Proc. R. Acad. Soc. Lond. 243:241-253 (1991); Moore, et al., Genomics 10:654-660 (1991); Jeffreys, et al., Anim. Genet. 18:1-15 (1987); Hillel, et al., Anim. Genet. 20:145-155 (1989); Hillel, et al., Genet. 124:783-789 (1990), all of which are herein incorporated by reference in their entirety).

[0241] The detection of polymorphic sites in a sample of DNA may be facilitated through the use of nucleic acid amplification methods. Such methods specifically increase the concentration of polynucleotides that span the polymorphic site, or include that site and sequences located either distal or proximal to it. Such amplified molecules can be readily detected by gel electrophoresis or other means.

[0242] The most preferred method of achieving such amplification employs the polymerase chain reaction (“PCR”) (Mullis, et al., Cold Spring Harbor Symp. Quant. Biol. 51:263-273 (1986); Erlich, et al., European Patent Appln. 50,424; European Patent Appln. 84,796, European Patent Application 258,017, European Patent Appln. 237,362; Mullis, European Patent Appln. 201,184; Mullis, et al., U.S. Pat. No. 4,683,202; Erlich., U.S. Pat. No. 4,582,788; and Saiki, et al., U.S. Pat. No. 4,683,194, all of which are herein incorporated by reference in their entirety), using primer pairs that are capable of hybridizing to the proximal sequences that define a polymorphism in its double-stranded form.

[0243] In lieu of PCR, alternative methods, such as the “Ligase Chain Reaction” (“LCR”) may be used (Barany, Proc. Natl. Acad. Sci. (U.S.A.) 88:189-193 (1991), herein incorporated by reference in its entirety). LCR uses two pairs of oligonucleotide probes to exponentially amplify a specific target. The sequences of each pair of oligonucleotides is selected to permit the pair to hybridize to abutting sequences of the same strand of the target. Such hybridization forms a substrate for a template-dependent ligase. As with PCR, the resulting products thus serve as a template in subsequent cycles and an exponential amplification of the desired sequence is obtained.

[0244] LCR can be performed with oligonucleotides having the proximal and distal sequences of the same strand of a polymorphic site. In one embodiment, either oligonucleotide will be designed to include the actual polymorphic site of the polymorphism. In such an embodiment, the reaction conditions are selected such that the oligonucleotides can be ligated together only if the target molecule either contains or lacks the specific nucleotide that is complementary to the polymorphic site present on the oligonucleotide. Alternatively, the oligonucleotides may be selected such that they do not include the polymorphic site (see, Segev, PCT Application WO 90/01069, herein incorporated by reference in its entirety).

[0245] The “Oligonucleotide Ligation Assay” (“OLA”) may alternatively be employed (Landegren, et al., Science 241:1077-1080 (1988), herein incorporated by reference in its entirety). The OLA protocol uses two oligonucleotides which are designed to be capable of hybridizing to abutting sequences of a single strand of a target. OLA, like LCR, is particularly suited for the detection of point mutations. Unlike LCR, however, OLA results in “linear” rather than exponential amplification of the target sequence.

[0246] Nickerson, et al. have described a nucleic acid detection assay that combines attributes of PCR and OLA (Nickerson, et al., Proc. Natl. Acad. Sci. (U.S.A.) 87:8923-8927 (1990), herein incorporated by reference in its entirety). In this method, PCR is used to achieve the exponential amplification of target DNA, which is then detected using OLA. In addition to requiring multiple, and separate, processing steps, one problem associated with such combinations is that they inherit all of the problems associated with PCR and OLA.

[0247] Schemes based on ligation of two (or more) oligonucleotides in the presence of nucleic acid having the sequence of the resulting “di-oligonucleotide”, thereby amplifying the di-oligonucleotide, are also known (Wu, et al., Genomics 4:560 (1989), herein incorporated by reference in its entirety), and may be readily adapted to the purposes of the present invention.

[0248] Other known nucleic acid amplification procedures, such as allele-specific oligomers, branched DNA technology, transcription-based amplification systems, or isothermal amplification methods may also be used to amplify and analyze such polymorphisms (Malek, et al., U.S. Pat. No. 5,130,238; Davey, et al., European Patent Application 329,822; Schuster et al., U.S. Pat. No. 5,169,766; Miller, et al., PCT Application WO 89/06700; Kwoh, et al., Proc. Natl. Acad. Sci. (U.S.A.) 86:1173-1177 (1989); Gingeras, et al., PCT Application WO 88/10315; Walker, et al., Proc. Natl. Acad. Sci. (U.S.A.) 89:392-396 (1992), all of which are herein incorporated by reference in their entirety).

[0249] The identification of a polymorphism can be determined in a variety of ways. By correlating the presence or absence of it in an plant with the presence or absence of a phenotype, it is possible to predict the phenotype of that plant. If a polymorphism creates or destroys a restriction endonuclease cleavage site, or if it results in the loss or insertion of DNA (e.g., a VNTR polymorphism), it will alter the size or profile of the DNA fragments that are generated by digestion with that restriction endonuclease. As such, individuals that possess a variant sequence can be distinguished from those having the original sequence by restriction fragment analysis. Polymorphisms that can be identified in this manner are termed “restriction fragment length polymorphisms” (“RFLPs”). RFLPs have been widely used in human and plant genetic analyses (Glassberg, UK Patent Application 2135774; Skolnick, et al., Cytogen. Cell Genet. 32:58-67 (1982); Botstein, et al., Ann. J. Hum. Genet. 32:314-331 (1980); Fischer, et al. PCT Application WO90/13668; Uhlen, PCT Application WO90/11369, all of which are herein incorporated by reference in their entirety).

[0250] Polymorphisms can also be identified by Single Strand Conformation Polymorphism (SSCP) analysis. The SSCP technique is a method capable of identifying most sequence variations in a single strand of DNA, typically between 150 and 250 nucleotides in length (Elles, Methods in Molecular Medicine: Molecular Diagnosis of Genetic Diseases, Humana Press (1996); Orita et al., Genomics 5: 874-879 (1989), both of which are herein incorporated by reference in their entirety). Under denaturing conditions a single strand of DNA will adopt a conformation that is uniquely dependent on its sequence conformation. This conformation usually will be different, even if only a single base is changed. Most conformations have been reported to alter the physical configuration or size sufficiently to be detectable by electrophoresis. A number of protocols have been described for SSCP including, but not limited to Lee et al., Anal. Biochem. 205: 289-293 (1992); Suzuki et al., Anal. Biochem. 192: 82-84 (1991); Lo et al., Nucleic Acids Research 20: 1005-1009 (1992); Sarkar et al., Genomics 13: 441-443 (1992), all of which are herein incorporated by reference in their entirety). It is understood that one or more of the nucleic acids of the present invention, may be utilized as markers or probes to detect polymorphisms by SSCP analysis.

[0251] Polymorphisms may also be found using a DNA fingerprinting technique called amplified fragment length polymorphism (AFLP), which is based on the selective PCR amplification of restriction fragments from a total digest of genomic DNA to profile that DNA (Vos, et al., Nucleic Acids Res. 23:4407-4414 (1995), herein incorporated by reference in its entirety). This method allows for the specific co-amplification of high numbers of restriction fragments, which can be visualized by PCR without knowledge of the nucleic acid sequence.

[0252] AFLP employs basically three steps. Initially, a sample of genomic DNA is cut with restriction enzymes and oligonucleotide adapters are ligated to the restriction fragments of the DNA. The restriction fragments are then amplified using PCR by using the adapter and restriction sequence as target sites for primer annealing. The selective amplification is achieved by the use of primers that extend into the restriction fragments, amplifying only those fragments in which the primer extensions match the nucleotide flanking the restriction sites. These amplified fragments are then visualized on a denaturing polyacrylamide gel.

[0253] AFLP analysis has been performed on Salix (Beismann, et al., Mol. Ecol. 6:989-993 (1997); Acinetobacter (Janssen, et al., Int. J. Syst. Bacteriol 47:1179-1187 (1997), both of which are herein incorporated by reference in their entirety), Aeromonas popoffi (Huys, et al., Int. J. Syst. Bacteriol. 47:1165-1171 (1997), herein incorporated by reference in its entirety), rice (McCouch, et al., Plant Mol. Biol. 35:89-99 (1997); Nandi, et al., Mol. Gen. Genet. 255:1-8 (1997); Cho, et al., Genome 39:373-378 (1996), all of which are herein incorporated by reference in their entirety), barley (Hordeum vulgare) (Simons, et al., Genomics 44:61-70 (1997); Waugh, et al., Mol. Gen. Genet. 255:311-321 (1997); Qi, et al., Mol. Gen Genet. 254:330-336 (1997); Becker, et al., Mol. Gen. Genet. 249:65-73 (1995), all of which are herein incorporated by reference in their entirety), potato (Van der Voort, et al., Mol. Gen. Genet. 255:438-447 (1997); Meksem, et al., Mol. Gen. Genet. 249:74-81 (1995), both of which are herein incorporated by reference in their entirety), Phytophthora infestans (Van der Lee, et al., Fungal Genet. Biol. 21:278-291 (1997), herein incorporated by reference in its entirety), Bacillus anthracis (Keim, et al., J. Bacteriol. 179:818-824 (1997), herein incorporated by reference in its entirety), Astragalus cremnophylax (Travis, et al., Mol. Ecol. 5:735-745 (1996), herein incorporated by reference in its entirety), Arabidopsis (Cnops, et al., Mol. Gen. Genet. 253:32-41 (1996), herein incorporated by reference in its entirety), Escherichia coli (Lin, et al., Nucleic Acids Res. 24:3649-3650 (1996), herein incorporated by reference in its entirety), Aeromonas (Huys, et al., Int. J. Syst. Bacteriol. 46:572-580 (1996), herein incorporated by reference in its entirety), nematode (Folkertsma, et al., Mol. Plant Microbe Interact. 9:47-54 (1996), herein incorporated by reference in its entirety), tomato (Thomas, et al., Plant J. 8:785-794 (1995), herein incorporated by reference in its entirety), and human (Latorra, et al., PCR Methods Appl. 3:351-358 (1994), herein incorporated by reference in its entirety). AFLP analysis has also been used for fingerprinting mRNA (Money, et al., Nucleic Acids Res. 24:2616-2617 (1996); Bachem, et al., Plant J. 9:745-753 (1996), both of which are herein incorporated by reference in their entirety). It is understood that one or more of the nucleic acid molecules of the present invention, may be utilized as markers or probes to detect polymorphisms by AFLP analysis for fingerprinting mRNA.

[0254] Polymorphisms may also be found using random amplified polymorphic DNA (RAPD) (Williams et al., Nucl. Acids Res. 18: 6531-6535 (1990), herein incorporated by reference in its entirety) and cleaveable amplified polymorphic sequences (CAPS) (Lyamichev et al., Science 260: 778-783 (1993), herein incorporated by reference in its entirety). It is understood that one or more of the nucleic acid molecules of the present invention, may be utilized as markers or probes to detect polymorphisms by RAPD or CAPS analysis.

[0255] Polymorphisms are useful, through linkage analysis, to define the genetic distances or physical distances between polymorphic traits. A physical map or ordered array of genomic DNA fragments in the desired region containing the gene may be used to characterize and isolate genes corresponding to desirable traits. For this purpose, yeast artificial chromosomes (YACs), bacterial artificial chromosomes (BACs), and cosmids are appropriate vectors for cloning large segments of DNA molecules. Although fewer clones are needed to make a contig for a specific genomic region by using YACs (Agyare et al., Genome Res. 7: 1-9 (1997); James et al., Genomics 32: 425-430 (1996), both of which are herein incorporated by reference in their entirety), chimerism in the inserted DNA fragment can arise. Cosmids are convenient for handling smaller-size DNA molecules and may be used for transformation in developing transgenic plants. BACs also carry DNA fragments and are less prone to chimerism.

[0256] Through genetic mapping, a fine scale linkage map can be developed using DNA markers, and, then, a genomic DNA library of large-sized fragments can be screened with molecular markers linked to the desired trait. Molecular markers are advantageous for agronomic traits that are otherwise difficult to tag, such as resistance to pathogens, insects and nematodes, tolerance to abiotic stresses, quality parameters and quantitative traits. The essential requirements for marker-assisted selection in a plant breeding program are: (1) the marker(s) should co-segregate or be closely linked with the desired trait; (2) an efficient means of screening large populations for the molecular marker(s) should be available; and (3) the screening technique should have high reproducibility across laboratories, be economical to use and be user-friendly. Molecular marker studies using near-isogenic lines (NILs) (Martin et al., Proc. Natl. Acad. Sci. (U.S.A.). 88: 2336-2340 (1991); Young et al., Genetics 120: 579-585. (1988), both of which are herein incorporated by reference in their entirety), bulked segregant analysis (Michelmore et al., Proc. Natl. Acad. Sci. (U.S.A) 88: 9828-9832 (1991), herein incorporated by reference in its entirety) or recombinant inbred lines (Mohan et al., Theor. Appl. Genet. 87: 782-788 (1994), herein incorporated by reference in its entirety) have been used to map genes in different plant species (Coe and Neuffer, In: Genetic maps: locus maps of complex genomes, ed. S. J. O'Brien, Cold Spring Harbor Laboratory, Cold Spring Harbor, N.Y., 157-189 (1993), herein incorporated by reference in its entirety). It is understood that one or more of the nucleic acid molecules of the present invention may be used as molecular markers.

[0257] In accordance with this aspect of the present invention, a sample nucleic acid is obtained from cells. Any source of nucleic acid may be used. Preferably, the nucleic acid is genomic DNA. The nucleic acid is subjected to restriction endonuclease digestion. For example, one or more EST nucleic acid molecule or fragment thereof can be used as a probe in accordance with the above-described polymorphic methods. The polymorphism obtained in this approach can then be cloned to identify the mutation at the coding region which alters the protein's structure or regulatory region of the gene which affects its expression level.

[0258] In one aspect of the present invention, an evaluation can be conducted to determine whether a particular mRNA molecule is present. One or more of the nucleic acid molecules of the present invention, preferably one or more of the EST nucleic acid molecules of the present invention are utilized to detect the presence or quantity of the mRNA species. Such molecules are then incubated with cell or tissue extracts of a plant under conditions sufficient to permit nucleic acid hybridization. The detection of double-stranded probe-mRNA hybrid molecules is indicative of the presence of the mRNA; the amount of such hybrid formed is proportional to the amount of mRNA. Thus, such probes may be used to ascertain the level and extent of the mRNA production in a plant's cells or tissues. Such nucleic acid hybridization may be conducted under quantitative conditions (thereby providing a numerical value of the amount of the mRNA present). Alternatively, the assay may be conducted as a qualitative assay that indicates either that the mRNA is present, or that its level exceeds a user set, predefined value.

[0259] A principle of in situ hybridization is that a labeled, single-stranded nucleic acid probe will hybridize to a complementary strand of cellular DNA or RNA and, under the appropriate conditions, these molecules will form a stable hybrid. When nucleic acid hybridization is combined with histological techniques, specific DNA or RNA sequences can be identified within a single cell. An advantage of in situ hybridization over more conventional techniques for the detection of nucleic acids is that it allows an investigator to determine the precise spatial population (Angerer et al., Dev. Biol. 101: 477-484 (1984); Angerer et al., Dev. Biol. 112: 157-166 (1985); Dixon et al., EMBO J. 10: 1317-1324 (1991), all of which are herein incorporated by reference in their entirety). In situ hybridization may be used to measure the steady-state level of RNA accumulation. It is a sensitive technique and RNA sequences present in as few as 5-10 copies per cell can be detected (Hardin et al., J. Mol. Biol. 202: 417-431.(1989), herein incorporated by reference in its entirety). A number of protocols have been devised for in situ hybridization, each with tissue preparation, hybridization, and washing conditions (Meyerowitz, Plant Mol. Biol. Rep. 5: 242-250 (1987); Cox and Goldberg, In: Plant Molecular Biology: A Practical Approach (ed. C. H. Shaw), pp. 1-35. IRL Press, Oxford (1988); Raikhel et al., In situ RNA hybridization in plant tissues. In Plant Molecular Biology Manual, vol. B9: 1-32. Kluwer Academic Publisher, Dordrecht, Belgium (1989), all of which are herein incorporated by reference in their entirety).

[0260] In situ hybridization also allows for the localization of proteins within a tissue or cell (Wilkinson, In Situ Hybridization, Oxford University Press, Oxford (1992); Langdale, In Situ Hybridization 165-179 In: The Maize Handbook, eds. Freeling and Walbot, Springer-Verlag, New York (1994), both of which are herein incorporated by reference in their entirety). It is understood that one or more of the molecules of the present invention, preferably one or more of 20 the EST nucleic acid molecules of the present invention or one or more of the antibodies of the present invention may be utilized to detect the expression level or pattern of a protein or mRNA thereof by in situ hybridization.

[0261] Fluorescent in situ hybridization also enables the localization of a particular DNA sequence along a chromosome which is useful, among other uses, for gene mapping, following chromosomes in hybrid lines or detecting chromosomes with translocations, transversions or deletions. In situ hybridization has been used to identify chromosomes in several plant species (Griffor et al., Plant Mol. Biol. 17: 101-109 (1991); Gustafson et al., Proc. Nat'l. Acad. Sci. (U.S.A.). 87: 1899-1902 (1990); Mukai and Gill, Genome 34: 448-452. (1991); Schwarzacher and Heslop-Harrison, Genome 34: 317-323 (1991); Wang et al., Jpn. J. Genet. 66: 313-316 (1991); Parra and Windle, Nature Genetics, 5: 17-21 (1993), all of which are herein incorporated by reference in their entirety). It is understood that the nucleic acid molecules of the present invention may be used as probes or markers to localize sequences along a chromosome.

[0262] It is also understood that one or more of the molecules of the present invention, preferably one or more of the EST nucleic acid molecules of the present invention or one or more of the antibodies of the present invention may be utilized to detect the expression level or pattern of a protein or mRNA thereof by in situ hybridization.

[0263] Further, it is also understood that any of the nucleic acid molecules of the present invention may be used as marker nucleic acids and or probes in connection with methods that require probes or marker nucleic acids. As used herein, a probe is an agent that is utilized to determine an attribute or feature (e.g. presence or absence, location, correlation, identity, etc.) or a molecule, cell, tissue or plant. As used herein, a marker nucleic acid is a nucleic acid molecule that is utilized to determine an attribute or feature (e.g., presence or absence, location, correlation, etc.) or a molecule, cell, tissue or plant.

[0264] Nucleic acid molecules of the present invention can be used to monitor expression. A microarray-based method for high-throughput monitoring of gene expression may be utilized to measure gene-specific hybridization targets. This ‘chip’-based approach involves using microarrays of nucleic acid molecules as gene-specific hybridization targets to quantitatively measure expression of the corresponding genes (Schena et al., Science 270: 467-470 (1995); Shalon, Ph.D. Thesis,Stanford University (1996), both of which are herein incorporated by reference in their entirety). Every nucleotide in a large sequence can be queried at the same time. Hybridization can be used to efficiently analyze nucleotide sequences.

[0265] Several microarray methods have been described. One method compares the sequences to be analyzed by hybridization to a set of oligonucleotides or cDNA molecules representing all possible subsequences (Bains and Smith, J. Theor. Biol. 135: 303 (1989), herein incorporated by reference in its entirety). A second method hybridizes the sample to an array of oligonucleotide or cDNA probes. An array consisting of oligonucleotides or cDNA molecules complementary to subsequences of a target sequence can be used to determine the identity of a target sequence, measure its amount, and detect differences between the target and a reference sequence. Nucleic acid molecules microarrays may also be screened with protein molecules or fragments thereof to determine nucleic acid molecules that specifically bind protein molecules or fragments thereof.

[0266] The microarray approach may also be used with polypeptide targets (U.S. Pat. No. 5,445,934; U.S. Pat. No. 5,143,854; U.S. Pat. No. 5,079,600; U.S. Pat. No. 4,923,901, all of which are herein incorporated by reference in their entirety). Essentially, polypeptides are synthesized on a substrate (microarray) and these polypeptides can be screened with either protein molecules or fragments thereof or nucleic acid molecules in order to screen for either protein molecules or fragments thereof or nucleic acid molecules that specifically bind the target polypeptides (Fodor et al., Science 251: 767-773 (1991), herein incorporated by reference in its entirety).

[0267] It is understood that one or more of the molecules of the present invention, preferably one or more of the nucleic acid molecules or protein molecules or fragments thereof of the present invention may be utilized in a microarray based method. In a preferred embodiment of the present invention, one or more of the Cyanidium caldarium nucleic acid molecules or protein molecules or fragments thereof of the present invention may be utilized in a microarray based method. A particular preferred microarray embodiment of the present invention is a microarray comprising nucleic acid molecules encoding genes or fragments thereof that are homologues of known genes or nucleic acid molecules that comprise genes or fragment thereof that elicit only limited or no matches to known genes. A further preferred microarray embodiment of the present invention is a microarray comprising nucleic acid molecules having genes or fragments thereof that are homologues of known genes and nucleic acid molecules that comprise genes or fragment thereof that elicit only limited or no matches to known genes.

[0268] Nucleic acid molecules of the present invention may be used in site directed mutagenesis. Site-directed mutagenesis may be utilized to modify nucleic acid sequences, particularly as it is a technique that allows one or more of the amino acids encoded by a nucleic acid molecule to be altered (e.g. a threonine to be replaced by a methionine). Three basic methods for site-directed mutagenesis are often employed. These are cassette mutagenesis (Wells et al., Gene 34: 315-23 (1985), herein incorporated by reference in its entirety), primer extension (Gilliam et al., Gene 12: 129-137 (1980); Zoller and Smith, Methods Enzymol. 100: 468-500 (1983); Dalbadie-McFarland et al., Proc. Natl. Acad. Sci. (U.S.A.). 79: 6409-6413 (1982), all of which are herein incorporated by reference in their entirety) and methods based upon PCR (Scharf et al., Science 233: 1076-1078 (1986); Higuchi et al., Nucleic Acids Res. 16: 7351-7367 (1988), both of which are herein incorporated by reference in their entirety). Site-directed mutagenesis approaches are also described in EP 0 385 962, EP 0 359 472, and PCT Patent Application WO 93/07278, all of which are herein incorporated by reference by reference in their entirety.

[0269] Site-directed mutagenesis strategies have been applied to plants for both in vitro as well as in vivo site-directed mutagenesis (Lanz et al., J. Biol. Chem. 266: 9971-9976 (1991); Kovgan and Zhdanov, Biotekhnologiya 5: 148-154, No. 207160n, Chemical Abstracts 110: 225 (1989); Ge et al., Proc. Natl. Acad. Sci. (U.S.A.) 86: 4037-4041 (1989); Zhu et al., J. Biol. Chem. 271: 18494-18498 (1996); Chu et al., Biochemistry 33: 6150-6157 (1994), Small et al., EMBO J. 11: 1291-1296 (1992); Cho et al., Mol. Biotechnol. 8: 13-16 (1997); Kita et al., J. Biol. Chem. 271: 26529-26535 (1996); Jin et al., Mol. Microbiol. 7: 555-562 (1993); Hatfield and Vierstra, J. Biol. Chem. 267: 14799-14803 (1992); Zhao et al., Biochemistry 31: 5093-5099 (1992), all of which are herein incorporated by reference in their entirety).

[0270] Any of the nucleic acid molecules of the present invention may either be modified by site-directed mutagenesis or used as, for example, nucleic acid molecules that are used to target other nucleic acid molecules for modification. It is understood that mutants with more than one altered nucleotide can be constructed using techniques that practitioners skilled in the art are familiar with such as isolating restriction fragments and ligating such fragments into an expression vector (see, for example, Sambrook et al., Molecular Cloning: A Laboratory Manual, Cold Spring Harbor Press (1989)). In a preferred embodiment of the present invention, one or more of the nucleic acid molecules or fragments thereof of the present invention may be modified by site-directed mutagenesis.

[0271] In addition to the above discussed procedures, practitioners are familiar with the standard resource materials which describe specific conditions and procedures for the construction, manipulation and isolation of macromolecules (e.g., DNA molecules, plasmids, etc.), generation of recombinant organisms and the screening and isolating of clones, (see for example, Sambrook et al., Molecular Cloning: A Laboratory Manual, Cold Spring Harbor Press (1989); Mailga et al., Methods in Plant Molecular Biology, Cold Spring Harbor Press (1995); Birren et al., Genome Analysis: Analyzing DNA, 1, Cold Spring Harbor, N.Y., all of which are herein incorporated by reference in their entirety).

[0272] Having now generally described the invention, the same will be more readily understood through reference to the following examples which are provided by way of illustration, and are not intended to be limiting of the present invention, unless specified.

### EXAMPLE 1

[0273] The cDNA library LIB190 is prepared from the cultures of the thermophilic red algae Cyanidium caldarium. Cyanidium cultures were grown in media described in Ascione et al. (Science 153: 752-755; 1966), supplemented with maltose and galactose as carbon sources and grown with constant illumination (ca. 700 micoEinsteins of light) at 45° C. with agitation at 200 rpm on a rotary shaker. Samples were subcultured into fresh media in a 2 liter flask (200 ml volume) and grown for 5 days and then harvested for RNA preparation. Total RNA is isolated using standard methods and precipitated with LiCl. Poly A+ mRNA is purified by oligodT chromatography for use in library construction in pSPORT plasmid.

[0274] For the construction of the cDNA library of the present invention, the Superscript™ Plasmid System for cDNA synthesis and Plasmid Cloning (Gibco BRL, Life Technologies, Gaithersburg, Md.) or similar system, following the conditions suggested by the manufacturer, is used. cDNA size fractionation columns from Gibco BRL (Gibco BRL, Life Technologies, Gaithersburg, Md.) are used for size selection of cDNA inserts. Clones are selected and the plasmid DNA is isolated using a commercially available kit.

[0275] The quality of the cDNA libraries is determined by examining the cDNA insert size, and also by sequence analysis of a random selection an appropriate number of clones from the library.

### EXAMPLE 2

[0276] The cDNA library of the present invention, LIB190, is plated on LB agar containing the appropriate antibiotics for selection and incubated at 37° C. for a sufficient time to allow the growth of individual colonies. Single colonies are individually placed in each well of 96-well microtiter plates containing LB liquid including the selective antibiotics. The plates are incubated overnight at approximately 37° C. with gentle shaking to promote growth of the cultures. The plasmid DNA is isolated from each clone using a commercially available kit such as Qiaprep plasmid isolation kits, using the conditions recommended by the manufacturer (Qiagen Inc., Santa Clarita, Calif.). A variety of plasmid isolation kits are commercially available.

[0277] The template plasmid DNA clones are used for subsequent sequencing. For sequencing the cDNA library LIB190, a commercially available sequencing kit, such as the ABI PRISM dRhodamine Terminator Cycle Sequencing Ready Reaction Kit with AmpliTaq® DNA Polymerase, FS, is used under the conditions recommended by the manufacturer (PE Applied Biosystems, Foster City, Calif.). The ESTs of the present invention are generated by sequencing initiated from the 5′ end of each cDNA clone.

[0278] Two basic methods can be used for DNA sequencing, the chain termination method of Sanger et al., Proc. Natl. Acad. Sci. (U.S.A.) 74: 5463-5467 (1977), herein incorporated by reference in its entirety and the chemical degradation method of Maxam and Gilbert, Proc. Natl. Acad. Sci. (U.S.A.) 74: 560-564 (1977), herein incorporated by reference in its entirety. Automation and advances in technology such as the replacement of radioisotopes with fluorescence-based sequencing have reduced the effort required to sequence DNA (Craxton, Method, 2: 20-26 (1991); Ju et al., Proc. Natl. Acad. Sci. (U.S.A.) 92: 4347-4351 (1995); Tabor and Richardson, Proc. Natl. Acad. Sci. (U.S.A.) 92: 6339-6343 (1995), all of which are herein incorporated by reference in their entirety). Automated sequencers are available from, for example, Pharmacia Biotech, Inc., Piscataway, N.J. (Pharmacia ALF), LI-COR, Inc., Lincoln, Neb. (LI-COR 4,000) and Millipore, Bedford, Mass. (Millipore Base Station).

[0279] In addition, advances in capillary gel electrophoresis have also reduced the effort required to sequence DNA and such advances provide a rapid high resolution approach for sequencing DNA samples (Swerdlow and Gesteland, Nucleic Acids Res. 18: 1415-1419 (1990); Smith, Nature 349: 812-813 (1991); Luckey et al., Methods Enzymol. 218: 154-172 (1993); Lu et al., J. Chromatog. A. 680: 497-501 (1994); Carson et al., Anal. Chem. 65: 3219-3226 (1993); Huang et al., Anal. Chem. 64: 2149-2154 (1992); Kheterpal et al., Electrophoresis 17: 1852-1859 (1996); Quesada and Zhang, Electrophoresis 17: 1841-1851 (1996); Baba, Yakugaku Zasshi 117: 265-281 (1997), all of which are herein incorporated by reference in their entirety).

[0280] A number of sequencing techniques are known in the art, including fluorescence-based sequencing methodologies. These methods have the detection, automation and instrumentation capability necessary for the analysis of large volumes of sequence data. Currently, the 377 DNA Sequencer (Perkin-Elmer Corp., Applied Biosystems Div., Foster City, Calif.) allows the most rapid electrophoresis and data collection. With these types of automated systems, fluorescent dye-labeled sequence reaction products are detected and data entered directly into the computer, producing a chromatogram that is subsequently viewed, stored, and analyzed using the corresponding software programs. These methods are known to those of skill in the art and have been described and reviewed (Birren et al., Genome Analysis: Analyzing DNA, 1, Cold Spring Harbor, N.Y., herein incorporated by reference in its entirety).

1-7. (canceled)

8. A substantially purified nucleic acid molecule comprising a nucleic acid sequence, wherein said nucleic acid sequence:
(a) hybridizes under stringent conditions to a nucleic acid sequence selected from the group consisting of SEQ ID NO: 1 through SEQ ID NO: 5674, a complement thereof and a fragment of either, or
(b) exhibits a 90% or greater identity to a nucleic acid sequence selected from the group consisting of SEQ ID NO: 1 through SEQ ID NO: 5674, a complement thereof and a fragment of either.

9. The substantially purified nucleic acid molecule of claim 8, wherein said nucleic acid molecule encodes an algal protein or fragment thereof.

10. The substantially purified nucleic acid molecule of claim 9, wherein said algal protein or fragment thereof is a Cyanidium caldarium protein or fragment thereof.

11. A substantially purified nucleic acid molecule comprising a nucleic acid sequence that shares between 100% and 90% sequence identity with a nucleic acid sequence selected from the group consisting of SEQ ID NO: 1 through SEQ ID NO: 5674, a complement thereof and a fragment of either.

12. The substantially purified nucleic acid molecule of claim 11, wherein said nucleic acid sequence shares between 100% and 95% sequence identity with a nucleic acid sequence selected from the group consisting of SEQ ID NO: 1 through SEQ ID NO: 5674, a complement thereof and a fragment of either.

13. The substantially purified nucleic acid molecule of claim 12, wherein said nucleic acid sequence shares between 100% and 98% sequence identity with a nucleic acid sequence selected from the group consisting of SEQ ID NO: 1 through SEQ ID NO: 5674, a complement thereof and a fragment of either.

14. The substantially purified nucleic acid molecule of claim 13, wherein said nucleic acid sequence shares between 100% and 99% sequence identity with a nucleic acid sequence selected from the group consisting of SEQ ID NO: 1 through SEQ ID NO: 5674, a complement thereof and a fragment of either.

15. The substantially purified nucleic acid molecule of claim 14, wherein said nucleic acid sequence shares 100% sequence identity with a nucleic acid sequence selected from the group consisting of SEQ ID NO: 1 through SEQ ID NO: 5674, a complement thereof and a fragment of either.

16. A substantially purified polypeptide, wherein said polypeptide is encoded by a nucleic acid molecule comprising a nucleic acid sequence, wherein said nucleic acid sequence:
(a) hybridizes under stringent conditions to a nucleic acid sequence selected from the group consisting of SEQ ID NO: 1 through SEQ ID NO: 5674, a complement thereof and a fragment of either, or
(b) exhibits a 90% or greater identity to a nucleic acid sequence selected from the group consisting of SEQ ID NO: 1 through SEQ ID NO: 5674, a complement thereof and a fragment of either.

17. A transformed plant having a nucleic acid molecule which comprises:
(a) an exogenous promoter region which functions in a plant cell to cause the production of an mRNA molecule; which is linked to;
(b) a structural nucleic acid molecule, wherein said structural nucleic acid molecule comprises a nucleic acid sequence, wherein said nucleic acid sequence
(i) hybridizes under stringent conditions to a nucleic acid sequence selected from the group consisting of SEQ ID NO: 1 through SEQ ID NO: 5674, a complement thereof and a fragment of either; or
(ii) exhibits a 90% or greater identity to a nucleic acid sequence selected from the group consisting of SEQ ID NO: 1 through SEQ ID NO: 5674, a complement thereof and a fragment of either,
which is linked to
(c) a 3′non-translated sequence that functions in said plant cell to cause the termination of transcription and the addition of polyadenylated ribonucleotides to said 3′end of said mRNA molecule.

18. The transformed plant according to claim 17, wherein said nucleic acid sequence is a complement of a nucleic acid sequence selected from the group consisting of SEQ ID NO: 1 through SEQ ID NO: 5674 or a fragment thereof.

19. The transformed plant according to claim 18, wherein said plant is selected from the group consisting of soybean, maize, cotton and wheat.

20. A transformed seed comprising a transformed plant cell comprising a nucleic acid molecule which comprises:
(a) an exogenous promoter region which functions in said plant cell to cause the production of an mRNA molecule; which is linked to;
(b) a structural nucleic acid molecule, wherein said structural nucleic acid molecule comprises a nucleic acid sequence, wherein said nucleic acid sequence
(i) hybridizes under stringent conditions to a nucleic acid sequence selected from the group consisting of SEQ ID NO: 1 through SEQ ID NO: 5674 a complement thereof and a fragment of either; or
(ii) exhibits a 90% or greater identity to a nucleic acid sequence selected from the group consisting of SEQ ID NO: 1 through SEQ ID NO: 5674, a complement thereof and a fragment of either,
which is linked to
(c) a 3′non-translated sequence that functions in said plant cell to cause the termination of transcription and the addition of polyadenylated ribonucleotides to said 3′end of said mRNA molecule.

21. The transformed seed according to claim 20, wherein said nucleic acid sequence is a complement of a nucleic acid sequence selected from the group consisting of SEQ ID NO: 1 through SEQ ID NO: 5674 or a fragment thereof.

22. The transformed seed according to claim 20, wherein said seed is selected from the group consisting of soybean, maize, cotton and wheat seed.

23. The transformed seed according to claim 20, wherein said exogenous promoter region functions in a seed cell.

24. The transformed seed according to claim 20, wherein said exogenous promoter region functions in a leaf cell.

25. A method of producing a genetically transformed plant, comprising the steps of:
(a) inserting into the genome of a plant cell a recombinant, double-stranded DNA molecule comprising
(i) a promoter which functions in plant cells to cause the production of an RNA sequence,
(ii) a structural nucleic acid molecule, wherein said structural nucleic acid molecule comprises a nucleic acid sequence, wherein said nucleic acid sequence
(A) hybridizes under stringent conditions to a nucleic acid sequence selected from the group consisting of SEQ ID NO: 1 through SEQ ID NO: 5674, a complement thereof and a fragment of either; or
(B) exhibits a 90% or greater identity to a nucleic acid sequence selected from the group consisting of SEQ ID NO: 1 through SEQ ID NO: 5674, a complement thereof and a fragment of either,
which is linked to
(iii) a 3′non-translated sequence which functions in plant cells to cause the addition of polyadenylated nucleotides to the 3′end of RNA sequence,
(b) obtaining a transformed plant cell with said structural nucleic acid molecule that encodes one or more proteins, wherein said structural nucleic acid molecule is transcribed and results in expression of said protein(s); and
(c) regenerating from said transformed plant cell a genetically transformed plant.

26. A method for increasing expression of a protein in a plant cell comprising growing a transformed plant cell containing a nucleic acid molecule that encodes a protein or fragment thereof, wherein said nucleic acid molecule comprises a nucleic acid sequence selected from the group consisting of SEQ ID NO: 1 through SEQ ID NO: 5674, a complement thereof and a fragment of either, and whereby said nucleic acid molecule increases expression of said protein.

27. A method of growing a transgenic plant comprising
(a) planting a transformed seed comprising a nucleic acid sequence selected from the group consisting of SEQ ID NO: 1 through SEQ ID NO: 5674, a complement thereof and a fragment of either, and
(b) growing a plant from said seed.

28. A transformed algal cell having a nucleic acid molecule which comprises:
(a) an exogenous promoter region which functions in said algal cell to cause the production of an mRNA molecule;
which is linked to;
(b) a structural nucleic acid molecule, wherein said structural nucleic acid molecule comprises a nucleic acid sequence, wherein said nucleic acid sequence
(i) hybridizes under stringent conditions to a nucleic acid sequence selected from the group consisting of SEQ ID NO: 1 through SEQ ID NO: 5674, a complement thereof and a fragment of either; or
(ii) exhibits a 90% or greater identity to a nucleic acid sequence selected from the group consisting of SEQ ID NO: 1 through SEQ ID NO: 5674, a complement thereof and a fragment of either,
which is linked to
(c) a 3′non-translated sequence that functions in said algal cell to cause the termination of transcription and the addition of polyadenylated ribonucleotides to said 3′end of said mRNA molecule.

29. The transformed algal cell according to claim 28, wherein said nucleic acid sequence is a complement of a nucleic acid sequence selected from the group consisting of SEQ ID NO: 1 through SEQ ID NO: 5674 or a fragment thereof.

The application's sequence listing, which the Patent Office published only in electronic form, follows.

SEQUENCE LISTING (5674 sequences)

SEQ ID NO: 1 - DNA, 408 bp, Cyanidium caldarium
  Clone ID: LIB190-001-Q1-E1-A12
acgccgtcgattgagaattacgagttgctttcgagtctcggctgttggttcatattattctttgctgaaagcgtttggggcttgtatcagtcgccatgaagtattccaaagttgtatcgtcgtctagaagaaagcagaggaaagcatactttcaagcaccatcttctgtacgacgaatactcatgagtgcacccttgtccaaggaactacgtacgaaatacagcgttcgttctttacctattcgaaaagaagacgaagtaatcatagttcgcggagctttcaagggtagagaaggaaaagttacaacgtgttatcgaaagaaatatcggatacatatcgagagagtgaccagagaaaaagcgaatggaatgactgtacctgtgggaatacatccatctaatgttgtta

SEQ ID NO: 2 - DNA, 73 bp, Cyanidium caldarium
  Clone ID: LIB190-001-Q1-E1-A3
agggcggcgtcataatagaaatccgaaaggagtagaagaaaagagagagaagaaagagaagaagagaaaagcc

SEQ ID NO: 3 - DNA, 415 bp, Cyanidium caldarium
  Clone ID: LIB190-001-Q1-E1-A5
ggcggcgtcataatagaaatccgaaaggagtagaagaaaagagagagaagaaagaaaagaagagaaaagccgtactgaagaccgacacaggtactcgaggagaaaggagacccaaattaaggtgagagaatggacgataaggaactaggcaaaaggatatggtatctgcggtagaacatatgaaagaagcagcaccgactgtttagcaaaaacacagcactctgcagaaaagagaaaatgtaaagtatagagtgtgcggcctgccaaatagtagagaagaaatcgatgaaagtgaaagcgagtaaaagatgaggtatagagaatggcggtcctaactgtaaggatccaaaggtagcgaagtaaatagacgtttgaaaggcgtccagtatgaaaggagaaacgagtgtagcactgt

SEQ ID NO: 4 - DNA, 350 bp, Cyanidium caldarium
  Clone ID: LIB190-001-Q1-E1-A6
gaggaaagaaagatcaaggaagtaagagtaagagaaggagtaatgtgaatgaaagcaggaaagtatttgaagaagagagtgtaaagcgcgtaccttttgcataatgtcccagcgagtgaaagaggaagcataaaaaaaaaagaactaagcaaaaagaaaaaaaaacagcagaaaaaaaatatgaaaaaaacaacaccaacagttaaaaaaaaaacacaacactcagcaaaaaaaaaaaaaatgtaaaataaagaatgtgacggactgccaaaaaaaaaaaaaaaagggcgagcaccctgaaaggtactaaccttatgaggtatacagaatgacggtactaactgtaaaga

SEQ ID NO: 5 - DNA, 413 bp, Cyanidium caldarium
  Clone ID: LIB190-001-Q1-E1-A8
ctagtttattaacctttctaagaattggtgcctttgtgtttggtgtagctgcaggttttggaagtgcttcagcggaccatcgtaaaagagaaaaaattttaatttctaaaattcacgagcgcaatgccaaaattgaggcgttggaaagtgaactaaagcaactgaaaggggaaattccagcttctacaggtgatccagttcaagattggttgaatcaattggaataagatgtatatgttacaagtgccttgtggaagagagagatagtcatttgaataaaattagttcttttcccaacaaaaaaaaaaacaaaaaaaaaaaaaaaaaaaaaaaaaaaaaaaaaaaaaaaaaaataaaaaaaaagaaagagctgaaaaaaaaaattagagtaaaaaaaaaaaaaaaaagggggg

SEQ ID NO: 6 - DNA, 410 bp, Cyanidium caldarium
  Clone ID: LIB190-001-Q1-E1-A9
cccacgcgtccgcccacgcgtccgcccacgcgtccgcccacgcgtccgcccacgcgtccgcccacgcgtccgatttttgtcaaaatttcacaaagagatatcgatcctaaagatatcccaagattgggtcatggagaagaagaattgggattggcagaatcttttagtcgtgaaggtcgagtcaactatatgttacagaaaagattggatgatttgcaactagtgaagcagttggcagagtctttgttgttacctggcgattatggttattcttgtgaaaatgcactcttgctatatcatacgcatgtgctgccattgaaaaaggagttttttgctcaactgtatcaaatacaagaccactccaacatatcatcgtggatagctcaacattttccatttcatagtttttt

SEQ ID NO: 7 - DNA, 271 bp, Cyanidium caldarium
  Clone ID: LIB190-001-Q1-E1-B11
cgaagatattcttgacgccaaaaacgcattggaacacctgagtgggttcaatgtagctggtcgataccttattgtattgtatcatcaaccggagaaaatgaaaaagaatgaggagaataaagtgtagaaggttgtttgtaacgtagagtatgcatattgtgtttgaccagcgtttggaactttgtagctattatccccgtggacgtatgtgaatagtcttggaatgactccagcagtaggagaaggctattaaaagtgatggtttattgtg

SEQ ID NO: 8 - DNA, 433 bp, Cyanidium caldarium
  Clone ID: LIB190-001-Q1-E1-B3
gaaaaaagtgtgcacaacatcaactttcacagcagcaatgtcacctgtttagcgttgaaagataaaggtccactcgtggcaacttgttcagaagacaagtccgtagcgttgtgggaccttcgagtcacggccccgctgcagagcttgaagtgctctcaccccctgagttgtgtatcttatggaagagatgactcagaaatcataacatcagactatagtggttcggcaaggatatggaatattgaaacaaatcgacaaattggtcgtttacagactcgcgactcttctattctcacaggttttcttcacgatacagcccgctcactatttattatgtttggaagctctggatacgtatacatcagtctactaaactccaaacggggaacaggagagcgtaaacttcgacttaaatatgtacacgggaaatcta

SEQ ID NO: 9 - DNA, 441 bp, Cyanidium caldarium
  Clone ID: LIB190-001-Q1-E1-B5
agctcgtgagatgcgttaagttatgtcagaaacgagtgatatatccaactgcagcaacttgtgttacatacttgtctctgttggtactgttgtagccatcctcttcactgcttcgttggtaggactcgtttcacgaagaagaagtcaacgaatacgagagtttccgaacccgttactagatgaagagtttgccgaaagtgttcgctcggacgaaattggtcgctatttcctggaaagagttgtaatggaagagtttcttttagtagatgaaacgggcaagtcttttgttccccctttaacactaaaccgggacaatgtggagactgtatatcctgaggtgtcctttgaacgtcatctcgcttgtggtaagggagagagtagtacacctgaagtggtgttttgtagtatatgtctagacgaaattaattcgcagaatgttgt

SEQ ID NO: 10 - DNA, 424 bp, Cyanidium caldarium
  Clone ID: LIB190-001-Q1-E1-B6
acaacgcgtcatgccataagttagatcaaagtttagtgataaatccagctgcagcaacttgtgtcatatatgtgtcactgttggtactgttattgccatcatcatcattgcttcgatggtatgacgcatttcacaaagaagaatcatcgaagtatagagtttcctgacacgtcagtagatttatagtttgctgacagtgttcgatcggaggatattggtcgctatttcctgcaaagagttgtaatggtagagtttcttttagtatatgaaacgggcaagtcgtttgttccccctttaacactaaaccgggacaatgtggagactgtatatcctgaggtgtcctttgaacgtcatctcgcttgtggtaacggagagagtagtacacctgaaatggtgttttgtagtatatgtccagacgaaatta

SEQ ID NO: 11 - DNA, 393 bp, Cyanidium caldarium
  Clone ID: LIB190-001-Q1-E1-B8
cgattttgagttccgcttgaatgatggttctactgtaaagttaggtcccttactcaatatgaaacttactgatgatgatgttgctgctggtctatccaataatcgggtgttgcaggctgcatttattattttacgtgacgaaaagaaaccattagatgcgaaagctcttgctgaacgcgcatcggaaaggggattccactgtctctctttgatgccgaataatacattctctagccaaatatatcgtaatatgaagagaaagaaggaacattctgcattttataaagtcaataatggggaattcggtctaaaaatttggcttcgtgaggaagccaatgccaagatggaggacggagaaacaaacaagaaaactcatcaaggcaccgtatctga

SEQ ID NO: 12 - DNA, 399 bp, Cyanidium caldarium
  unsure at all n locations
  Clone ID: LIB190-001-Q1-E1-B9
cccacgcgtccgcggacgcgtgggatacagtttccttcacttgtggttgggattgttgcgcaatgttcaagtcgctagcttttatttccatctatttgaaatatccacgctgcagtagctcggtgcaaacaaacgcagcacgaacaatatggaaacctttattatcaacgtatcaacagagactttattccggaatgtccgttgatattcggtgggtcacttacaaaaaccgaaagtcgtacacttcaagtatactaagtttcaagtcttcctattccacacaaggaggagacacggagggcaagatacctcattctaaagatatgaaaggagaacctcagtccgcttcagatgcttacgacaagacttgggctaaagaaaacttcanagacacttctg

SEQ ID NO: 13 - DNA, 454 bp, Cyanidium caldarium
  Clone ID: LIB190-001-Q1-E1-C1
cccacgcgtccgggcggcgtcataatagaaatccgaaaggagtagaagaaaagagagagaagaaagaaaagaagagaaaagccgtactgaagaccgacacaggtactcgaggagaaaggagacccaaattaaggtgagagaatggacgataaggaactaggcaaaaggatatggtatctgcggtagaacatatgaaagaagcagcaccgactgtttagcaaaaacacagcactctgcagaaaagagaaaatgtaaagtatagagtgtgcggcctgccaaatagtagagaagaaatcgatgaaagtgaaagcgagtaaaagatgaggtatagagaatggcggtcctaacagtaaggatccaaaggtagcgaagtaaatagacgtttgaaaggcgtccagtatgaaaggagaaacgagtgtagcactgtctagtcgtccaactcagcgaaacagca

SEQ ID NO: 14 - DNA, 354 bp, Cyanidium caldarium
  Clone ID: LIB190-001-Q1-E1-C10
acccacgcgtccgaaaagggtacaaggactttgtattccttgttacttgttgcccggtgcaagataagctcgttgaaaagtacgggctaccgagtatagaaccgtactcggaataaccggctccaacaacggcacatacaactaatatagtttattggcgtgttttggaaaaaaatgttgggaactaatttaccgcaggaaaaagaactcgacaggagcttttgtcgaatgatgttcgtgtaattcaacacgatatagctgcaggctcttcagatatacaagttgtcgaaacactattgatacctcccaatgtgcatatttcaaaacaaaagtttcgtctcctagttgtgaggt

SEQ ID NO: 15 - DNA, 386 bp, Cyanidium caldarium
  Clone ID: LIB190-001-Q1-E1-C11
gaaagcataggaagtgaaacggattaggaacccgtgtagtctatgcagtaaaagaaagaatgagtaagaaaaaagggagtcattccaccaggggagtaaaggcgcaagaaagaaacccaaagcaattgacgggaatcggaaaaaggggtggatcacgtaaattaatccgataaaccgagaaccttacctctccaagaaggtgttgcacggctgtcgaaagaacgtgctgtgaagtgagagaacgtacgagaaagccaagtgaggaaaagaaggcaagtagagggcggcccgagaaaggagagggcgtaagacgtgatacagagtaggaagaaaagagaagagagctagaaaggaggtaaaagaagagtaaaaggactagaagaggt

SEQ ID NO: 16 - DNA, 407 bp, Cyanidium caldarium
  Clone ID: LIB190-001-Q1-E1-C12
aattgaaaaaaaatataataataaaatatataaaaacatacaaaaaataccttttataatattattagttattgattttatcaaactattttttttaaaatcaattgatagtaaattcactttaaatgtcataaaatcaatttaatcaaactataactaattagaataaaatgaaaaataaacttaaaactttacgtgcagctttaaagagatttactataacaggaaataaaaaaatattacattataaagttggaaaaaatcatctactaagtaaaaagaataaaaaaagaaaaagacatttatctgttaaagtaataattaatgaatatattaaaaaagcacaaattaataaattattgccatatatttaaatatatggagatgaataaatataaaaataatat

SEQ ID NO: 17 - DNA, 407 bp, Cyanidium caldarium
  Clone ID: LIB190-001-Q1-E1-C2
gcgccaatccagaagaaaataattcaattttaatggaagaagaaaccttgtagtaaactttattggaaaattcttttgcctgtcctttatcttagtattgcatcacaatgtttggagatcatccttaaattgtcgttgaggaaaacatggcgacatttacggcacgcctcaagcagctctggaatcatccagcgggacctaaaacagtgtttttttgggctcctaccatgaaatgggctttggtggttgcaggcctgtccgatatgaagcgcccccctgagaaactttccgtacctcaaaacctagctttggcttgtactggagttatctgggttcgatatagttttgtaataacaccagtaaactataacttggcactggtcaatacctttgatggtgctaccggt

SEQ ID NO: 18 - DNA, 417 bp, Cyanidium caldarium
  Clone ID: LIB190-001-Q1-E1-C5
attacctctagtggcgctgcataaagaaattccaaggagtgctatcgttgagttgaagacagaactgcaaagacgcggctctgacctgtgcgtcttgcccaagttttgtacggactccatccttgagatatgccataaatacggaatagaagctatctactacaactatgccgagctcccagaccaaatgcagcttcagaatgatatgattactgatttggagaatagaggtgttcaagtcaaaggtttttggagcaatactcttgtctctccagagcagatggaaaacataaaagcttcagatattggatttaggaagttttcacaggaagcgaagaatgtgaagacttctgaacctcttcgtactccagacaagttacctcgtgttcctgaagacattccaacgagaatggtaga

SEQ ID NO: 19 - DNA, 388 bp, Cyanidium caldarium
  unsure at all n locations
  Clone ID: LIB190-001-Q1-E1-C7
ccgaatatactggagctaatagaagtggtcacgactgtanatgcatcatgcgtctttctcgtctttgaacacggcaataccgatttgggagtagtattagacactatgtacgagcgtcgctcaaagctagaattatgtcaagtgaagagtattttatatcaaatcttagaaggtctagtatatcttcatgatagctggataatgcatcgagacttgaaaatgtcgaacattttatacaatcgagatggtcaagtgaagattgccgattttggtttaacaagagaatatacttcaccattgaagccttttaccccaaaagtagtaactttatggtaccgtgcacccgaattgcttcgttgtgatcaaaatttacacaagatttcatatt

SEQ ID NO: 20 - DNA, 429 bp, Cyanidium caldarium
  Clone ID: LIB190-001-Q1-E1-C8
gttcgtactacaacagtttctttcaagcgtggattatcgcaagcagtgaaaagcgatcaacctacttctgcttcagaagcgcctcaagtttctagtgggggttcctccttacatccccaggaaatacccaaagatgctgtcaagttttcattgaaaccttttgccactcacctcatcgaagctccagaacccgtagcttatgctacgaaagaacagttactggcatatcatcgcacgatgacagttatgaggaggtctgagatcagtgctgatttaatgtataaagcacagttggttcgaggtttttgtcatttgtacgatggtcaagaagcaacagctgtaggcattgaatcagcgattacttggaaggatgctcttattactgcttatcgcaaccattgtcagcagttgggacgaggagatactccc

SEQ ID NO: 21 - DNA, 380 bp, Cyanidium caldarium
  Clone ID: LIB190-001-Q1-E1-C9
cccaaataatacgggcttgatgaatactctgtcacaacttgatattggggctatacaagctctacaattgttacaaaatcataccttgttgagacaactattgttgtatggaacagtgaaccagtctatttctattgcttccttgagtagtggaagtcatcagtttccatccatgttgggacctaatttaacgctggtaaagaactcgacaggagcttttgtgaatgatgttcgtgttattcagcaggatatagctgcaggctcttcagagatacaagttgtcgaaacactattgatacctcccaatgtgcatatttcataacaaaagtttcgtctcctagttgttaggtctataaagactttgtttgtttgcatctaaa

SEQ ID NO: 22 - DNA, 342 bp, Cyanidium caldarium
  Clone ID: LIB190-001-Q1-E1-D1
ggtcttaccgattctttcatgtcgcaactggttaatcaaggaaaagaaaccttagccactattgaaaaggaattgaaccgttcaaaaccgaactgcctcaagcttgggaactactgaatgatctcaaagtaaccaactaaaaagttgcctccatggagacccacgctcactcctgacagattcctttaacgaaacttcccggtttacagaacaaggcagattcctcttctaaaaaggagtttttgcctgcacggtcaacttttgaaacaacctgtttcctgagtattttggaaactgacattgaaaatttcgaacgccactttatgcaattgaaacctttct

SEQ ID NO: 23 - DNA, 409 bp, Cyanidium caldarium
  Clone ID: LIB190-001-Q1-E1-D10
gtgaaatagttgggcggtgtgcgacacttgtgtcattgcctcgtgtatgaatatatgcttcgtttcttggacacaagtcgacaaactcgagagtcaagagcacggggtgtgtgggacagtcgatgaacgcaatgcaaacttttcgagtatcaagtggaagatatgcaaagtatagcgaacgaatatcaaacgctgttttattactttctagtatcaaactcacgaaaaggtgccacgcgaaacggcacaatgcgaaagttgtgggtaaagttcaaagtggtttccgatttcatcaaggtattggaaataaagatattcaaaggaacattgtgcatcattaacagaaaaccttgtccagttgttggatgaatagttgtctagttgcttacgagacgcggaggatagacga

SEQ ID NO: 24 - DNA, 411 bp, Cyanidium caldarium
  Clone ID: LIB190-001-Q1-E1-D11
gctgggtacaagtaagtacagagaaggattacttttttttccagttgatatatatttcaaggttgcgactttttttgacgataccttgtacatttttggtttttattttaaagaacaacaaccaacctcgttactttttatgggtagttgttttgaatatattataccattttgctagcgatgttttgatgtttgtttcgatgggagcatattttgctcgtatatctgatgaaaatattggaggaacttatttgacgctattgaatactttacaaaatttgggaggaacgtggcccaagttgttggctcttttctttgtcgatcgtcttacttggaaacattgtgagtcggtttcgtctgttgcgatggaacaagttgccacggagcctatgatggtttgtaaagtttggg

SEQ ID NO: 25 - DNA, 384 bp, Cyanidium caldarium
  Clone ID: LIB190-001-Q1-E1-D12
gaaacaaataatacaagtaatggagaatatgtacaacaacccgcaaatacaaaaggaaatggcgtcgttgccactgaagagactccttctcggtcttccatggttggttctatttccagaacaagtttggagggtcatctggagcaaattcagagaatgttaaatagtcgaaagagtaccagtagtcatagtcgacgtagtatttctgatgacttgcttggtcctcttgcctttcatgtgaattctattatcgagagaatcggtagaaaaacgatatccgatgaaagatatcaaaaagatcaagttgctgtgccaagcactcagtcagcagcagtttccaaatcggtccaaaaagctgcagaagagagtcaaaggttttccaac

SEQ ID NO: 26 - DNA, 436 bp, Cyanidium caldarium
  unsure at all n locations
  Clone ID: LIB190-001-Q1-E1-D4
caatgctatacgaagaagatttgaaagacgtatttatattcctctaccaaatgttcaagcacgagaacgaatgtttcagttgcatgtgggaaatacaccgcatgagttgaaacctgaagatttccacgaattggctcttttaacggaaggatattcggggtccgatattgctattttagttcgtgatgcaattatgcagcctgtacgtacctgtcagaatgctcaagcgtttaagaaagtgaagaggccgaagagtgctacggacaaaacattaaagatattctatacaccctgtagtccaggtgatcctgaagccgaatctttgtctcttatggacatcaaggccgatgatcttttggttcccaatgtttccaggtatgactttgataaagttattgcanatacgagacctagtgtgagtcaagaagacatcgca

SEQ ID NO: 27 - DNA, 421 bp, Cyanidium caldarium
  Clone ID: LIB190-001-Q1-E1-D5
cccacgcgtccgcggacgcgtgggttccttatattctttgtgcttggacaatggttgcaaagactgctctgagttgcctctttctctctttccttatcgctgccgcagttgcagccgacgtagtttcagaggagagatggggatatgctcagcaaacccaacaacagcaacagtgccaacaagtatgtaaacagtatgcatactatcagagtccagtctgcacttccgtaaccacacagagcccatactggacccaatgctcgaagactgtgcaaacctttgtcccaagccagtgcagtacttatacccaatctcctacatggacctattgcagcacctacaccaccactagcgtaccatctcaatgcagcaaggccgtgactacttatactcaaacctgctgtgcttatgcccaacaaac

SEQ ID NO: 28 - DNA, 344 bp, Cyanidium caldarium
  Clone ID: LIB190-001-Q1-E1-D6
cccacgcgtccgagcaagaagagaagaatttgtcgaggtatgcggaatggcctcagtatcgaagtgaaacgggtcttttattccccaaagtggaccgttcgtacttgcgtacggtatgggattcttatatgaagcagtcgatagatatgacgttggaatgtaccaatagccattcgaagaatcctccaaagacgatgatcaatggagcgggtgttgggacgaccgtttcgtttcatcccgagtctattgtccatcaggaccatagttgataggaaggagagccattgtattgtggtgaggtgtcgatatatatatataaaacatacacatacacacattcatag

SEQ ID NO: 29 - DNA, 428 bp, Cyanidium caldarium
  unsure at all n locations
  Clone ID: LIB190-001-Q1-E1-D7
attctttgtgcttggacaatggttgcaaagactgctctgagttgcctctttctctctttccttatcgctgccgcagttgcagccgacgtagtttcagaggagagatggggatatgctcagcaaacccaacaacagcaacagtgccaacaagtatgtaaacagtatgcatactatcagagtccagtctgcacttccgtaaccacacagagcccatactggacccaatgctcgaagactgtgcaaacctttgtcccaagccagtgcagtacttatacccaatctcctacatggacctattgcagcacctacaccaccactagcgtaccatctcaatgcagcaaggccgtgactacctatactcaaacctgctgtgcttatgcccaacanacttcctatgcagtcagtaccgagcaatatgttcaggaaac

SEQ ID NO: 30 - DNA, 388 bp, Cyanidium caldarium
  Clone ID: LIB190-001-Q1-E1-E1
cggacgcgtcggttaacgcggcagggggcacgaagaacgtgtagcttttcgcgatatagtagtgagtgtcacatgcattcatgtaaatcgatcggctaattcaaacggtgtcgtggactggtagacatgactccacacattgctctagtatagggtaaaatgtcaccacacagtggaagtcaaatcaggaatctgatcatgtaggaaacgacattgcgactgagatagagcctacacctaaaatatcaccaatggcgacatgtgggcaatgtacatggatctgatagccagtacacaagagtgttgtaaacaggaaacgcatcttgaggagggaatgaacgtaagttattgcataagcacatgctcgcgataacggtagaacgtgtgt

SEQ ID NO: 31 - DNA, 384 bp, Cyanidium caldarium
  Clone ID: LIB190-001-Q1-E1-E10
tcaatttggaggacttgaagaatgccattcgtccagatactgttcttgtatccgtaatgatggtgaataacgaaattggagttattcagccaatcgaagagattggaaagatttgtcgggaacataaagtattctttcatacggacgctgctcaggcagtaggaaagattcctgttgatgtggagaaaatgcatatcgatcttatgtctatatcaggacataaaatttatggaccgaaaggaataggcgccttatatgtgcgtagaaagcctcgtgttcgtttggagccaattatcaatggcggaggtcaagaacgaggcctaagaagtggaacacttccagcacctttggtggttggaatgggtgcggcaagtgaagtttgta

SEQ ID NO: 32 - DNA, 403 bp, Cyanidium caldarium
  unsure at all n locations
  Clone ID: LIB190-001-Q1-E1-E11
cccacgcgtccgaagaagagagtgtaaggcggcgtcataatagaaatccgaaaggagtagaagaaaagagagagaagaaagaaaagaagagaaaagccgtactgaagaccgacacaggtactcgaggagaaaggagacccaaattaaggtgagagaatggacgataaggaactaggcaaaaggatatggtatctgcggtagaacatatgaaagaagcagcaccgactgtttagcaaaaacacagcactctgcagaaaagagaaaatgtaaagtatagagtgtgcggcctgccaaatagtagagaagacatcgatgaaagtgaaagcgagtaaaagatgaggtatagagaatggcggtcctaacggtaaggatccanaggtagcgaagtaaatagacgtttgaa

SEQ ID NO: 33 - DNA, 410 bp, Cyanidium caldarium
  Clone ID: LIB190-001-Q1-E1-E12
aaaactcatcagtggatgattgtttcaacctctgcgaaaactggcaatgcatctcctgctacacagtgctatacttcgcacacttcctatcagaaccttgtaaaggaagtagaaaagaaatggagcacaggaatgcgtattgttttgttaagtttcactgcaggaatgtggactgcagtattgaatcagaagagcactggctatcaagagcaagctttacattattgcccaggagctgactttccacgagaatgggttcgacagaaatgggatgaaggcttttttattactgccttggcaggtaatgccacgtcatggggtgttgtttgttccactatgacacgtaacaagcgatacaaacagcaaagttatatcgtttctccaacatttccttctaaatgggtagctga

SEQ ID NO: 34 - DNA, 437 bp, Cyanidium caldarium
  Clone ID: LIB190-001-Q1-E1-E6
caagaagagtcatcgaatagcccccacaatggatgcaacttgtatggttcgagtatccacagatatggaatgtggttatggctcgggttgtagtttatattttcaatggaacaaggaggcggtcatggaacgaggatggattgcacatataattgcagaaacagatatttggataaccaaagatatatttcattgcagatattggctgagaacgaggacgcttgaacaagcaaggttgtttggcattggctttgtgacggctgggaacggaacagaacaagtggccattccaagaaatatattctctcccaatgtgataaatatgttttctgatacatttcgatggattccttgtgtagcgagtcagaaagtatgcaccagagaacaaggtggggtatggttggagacgagtctggagttggataaagaggattggg

SEQ ID NO: 35 - DNA, 330 bp, Cyanidium caldarium
  Clone ID: LIB190-001-Q1-E1-E7
caaacgcgtgcggaatataaggaacaagcagaaagggactattaacgatcaaggtagatactacgaatggaattagcccagaatctaagatgaagtatcaatgtacaaaggagatagtgtaggtgacatcgagagggtatgcttagaagcaactgtctagagaggaacttgttcatacattcacaaatagagatccgtgaaacaatagaatgaggtaagaaatacgatcgtatcacgctaatgatgtataatagcatgaagataagacagaatgctgggtggagtagttactcatgacaagggatttaaacagtcagaatgaggaatggt

SEQ ID NO: 36 - DNA, 354 bp, Cyanidium caldarium
  Clone ID: LIB190-001-Q1-E1-E8
caaattattcgtcctgaggagtgtgaaatttattcctatattcccgactacgagtctgacccatacagttcttgcggtgctctgtggtctttttgttactttttttatcacaaaaatatgaaaaagattctgttgtttgcgtgtacgctgtccacccgtcttgcggacgattcggagagcgtcaacagtatggatgaagaagactttggcaaagaaagttccggattggaagctccttttgctatgtttgagacagtcatctaaattgtttatggtgacttgtatatagtagtttgtgagttatcgtaacacattggttaaaaaatgaagtgttttactatttgtttaccacgt

SEQ ID NO: 37 - DNA, 416 bp, Cyanidium caldarium
  Clone ID: LIB190-001-Q1-E1-E9
aagaaggaacaggagggaagaatcgtcgtcgaggaaagaacgacagtgaagaagaaaagcgggaacttgtgacagtagaagagggccaagaatatgcgcaagtgactcgcatgttgggaaacggacggtgtgaagctttatgtttcgacggtactcgaaggctatgccatatgcgatggaagatgagaaagaacgtttggattaatgccggagatactgttttaattggcttgagagactatcaagacgagcaaaccgatcatatactagagtataatccacatgaagttagagcattgaagtctcacggagatcttctagacaccacgaaaatcaacgaacaagagggtgaagaacgagaggacattacgtgtgaattcgatgatgtacatgcagtataatatccatatttcttg

SEQ ID NO: 38 - DNA, 404 bp, Cyanidium caldarium
  Clone ID: LIB190-001-Q1-E1-F12
gatagaagaggaatggagaagatgggagaggataaagcagagtagagaagaggagggagtagaagaggagttgaagtaaaaggtaagaaagaggaaaggtttacgagagaaggaagtagaaagaagagagtgtaaggcggcgtcataatagaaatccgaaaggagtagaagaaaagagagagaagaaagaaaagaagagaaaagccgtactgaagaccgacacaggtactcgaggagaaaggagacccaaattaaggtgagagaatggacgataaggaactaggcaaaaggatatggtatctgcggtagaacatatgaaagaagcagcaccgactgtttagcaaaaacacagcactctgcagaaaagagaaaatgtaaagtatagagtgtgcggcctgccaaat

SEQ ID NO: 39 - DNA, 327 bp, Cyanidium caldarium
  Clone ID: LIB190-001-Q1-E1-F2
cagcggtaaccctcaactatcctagtgaaaaacgacctctttctcctcgttttacaggggaacatgctcttagaagatatccatccggagaggaacgctgtatagcttgcaagttatgctaggcaatttgtccagctcaggcaataactatcgaagcggaacctctgcctgatggttcaagaagaaccacaagatatgatattgatatgacaaagtgcatatattgtggtatgtgccaagaagcttgtcctgtggatgccatcgtagaaggtcacaattttgagtatgcaacagaaacgcacgaagagttgctgtataataaggaaa

SEQ ID NO: 40 - DNA, 433 bp, Cyanidium caldarium
  unsure at all n locations
  Clone ID: LIB190-001-Q1-E1-F8
agctattcaagaacgtaaagataggacgaagcgaaggttgcgtattcagttgataggagagaaccaagtggataatgcaacccgcaagctggaaaagttattatatgcacatcaaggcacgtacaagattctcgaaagtagaacgttggaaagggcgatagagtttatggtcgaactttccactgcagaacgaactgctagtgttcttcgttctttggaacataagaaacccacagtggttgctcatccaattgcgacaagtggctcgtcctgattattgttgttattgtcatcatcatcatccacaccacanaaagaaatgcaaagttgtgttctttctggccaactcaccaaaaaacgcaaatccaactatgcggagccatgccaaggttgggtggtgtagttgtcatcttttttggaaaacacaaccaac

SEQ ID NO: 41 - DNA, 410 bp, Cyanidium caldarium
  Clone ID: LIB190-001-Q1-E1-F9
attgtacctagcttgacccctgagaaatactctcttttgaaatattgtattgttttgttgtccttggctttgactccaatacttgtaagaggtattcagtgtcttttctatcccaaatggatttgttctcgtcttcgtactttgcgatacgaaccgaaagagctactactaactagtgtcttgttattcgttcttttgattctgaatgtcgttttccttataagaatgggaagtaatgcgatgcacaaggcagatgcaaccatttctttggaagcgaatggattgaatcctcctttacgggtaatgacttataacatacaaatgggatttgatcgaagaggggaaatgaactgggaagaattggtggatatcatcaaggccgaagattcggatattttaggtcttcaaga

SEQ ID NO: 42 - DNA, 399 bp, Cyanidium caldarium
  Clone ID: LIB190-001-Q1-E1-G1
gttactaagccggatgttaggaggaatataaggatgtggcaatagatgtagaagtaagataataggagtaataatggaaggaagaatgcactcaagaatacgcacgataataatgatgttaataagaatattattgagtagagaaatgaatgaggtaataaatgtgattgtaaatgtgagtgtaatttagagtggagtaaagagtaagaagaatatgatgaaggatgtgatgaagggagagatagagatagaggagtggattgagaaatggattgagatagagatggtagaggtgatagcatgtatagtagcccattggggcaactactagtgcaatctctattgataacgctgattaaaaggagggaaatatggatggatatcatgataatttacata

SEQ ID NO: 43 - DNA, 407 bp, Cyanidium caldarium
  Clone ID: LIB190-001-Q1-E1-G12
ctaatagatgtgcttcctcgggagggaaaggtaaacagagccattgtggatacgcaacacgactggttggtaaatattgtggaacaatacgatatttctatggaagatattcgaaatggactttacactggaaatgaattgacttcgatgaacatatttgcttttcgacctgacatatttggttttatggaaaacaaggttggtcttgttggtttttggaaatggaagaaacattttgaatatcaagagccgatctttgtgactagttgaagcgttggttggaacagaatcctcatgaaccaagcaaggaatatatattgtccactatgttgaacgatttgtatgcagaaactggaaagcgaacccgagtgtttgaaacaagaaatgttcctttagaattgaccaat

SEQ ID NO: 44 - DNA, 149 bp, Cyanidium caldarium
  Clone ID: LIB190-001-Q1-E1-G2
gacaaatgggggaatgaaggctcaagcgggaacaattgctacaatcacagaagtggacgtccaatattctccagtctacagcgttgggtatggcgatggagtttatggtctatctttccactgcagaacgaagtgacggtgttcttcat

SEQ ID NO: 45 - DNA, 392 bp, Cyanidium caldarium
  Clone ID: LIB190-001-Q1-E1-G3
caaagagagatcgtttggttgccgacttttgtatgaacgacaacaacagcactatacaagtatggtttactgcactcaacggaacttgcaagatagttatactcacagctgtgggattctacttggcgtacaggggcagactgaacaaggaaatgtccaaaaatattagtagcattatttttgagattttacttccttgtctcttattttcctctattttacgtactttggtgaatgtgggcttatatgccctgtggtagattccacttatggccctggtatatctttggatgggttgggtattgggtcagttggtatgtaaatggacaaaaccgccacctttttttagaatggcatgtatcgtaacttgtgctcttggaaactccaatcag

SEQ ID NO: 46 - DNA, 449 bp, Cyanidium caldarium
  unsure at all n locations
  Clone ID: LIB190-001-Q1-E1-G6
cccacgcgtccgcccacgcgtccggacaagtacagcgatgacctcctcaaactttagcatgagaccgacaatattaacaaagttaatgcggaagcaatcgcagcaatcgagaaattggagcaccgacactaaactgtcatttgaaagcggtacaaactatcaaaatgatggaaatcttgcaacatccaaacacagtcaaggcgttggtcgcttgagtgtgagaggcgacgccccaagtgccgcgtcttctctatcgagattcaaacgccaagcagatgatgagttacaaacatcaacaaatactttgaaacgtagtaggaaatccttgaggttggatgagaccggatgaaccttagtcttttgagggaactttggttgttgtaacaataagatgttgttgtgaacctttcgcagttgatangaaaatgtcgagttgtagtttccttccc

SEQ ID NO: 47 - DNA, 448 bp, Cyanidium caldarium
  Clone ID: LIB190-001-Q1-E1-G8
aattcgagcaacgatcacgctacaaaggaccgattgacgatgcggttttctctataaccttgatttttgctcagtatttttgggccaatcaattatatttgttgtgcacctgtagctctcgtatgattatttggtgcagcggtacattttttggctgtttcaatggaggcaagcttcataagtgcagtctgttttaaatgtttttcgaaaacggtttctagtgtttgtcataggcggagcactctgcgtggcttagaaccagttacggctacgagtactatactcgaaagagatccacaacgaataaagaactgtttctatttacctgtttcaatgaaactttcggatgacgccacaaagctacttgttgtgacgggaaataatcgtgtaggtttgagtgactttactgtattatgaagattcacccgtttttttgggtaggaactca

SEQ ID NO: 48 - DNA, 405 bp, Cyanidium caldarium
  Clone ID: LIB190-001-Q1-E1-G9
atgatggacttggtgtccaagttgactcatgataatgatcgagaagttgcatatgcagctatcatggcgttgggttttattggagctggaaccaatcatgccagaattgctgccttgttgcgacaactttctgccttttatgcaaaagattcttctggactgtttgcagttcgaatagcacaaggcattcttcatatgggaaaaggattgataacgctatctcccatggacaatgagcgtttttcgatatatccaaatgctttttgtggtttgtttactattatctatttgtgctgcgtttcacaacacacgcttttgaataagcatcactatttgttatatttgttattgttggcagctcgtcctcgaatgttgtacacagtcgatgaggaaatgaagcctttg

SEQ ID NO: 49 - DNA, 409 bp, Cyanidium caldarium
  Clone ID: LIB190-001-Q1-E1-H10
cccacgcgtccgcccacgcgtccgcatgagcgtcgcggcatggataatacccagttcactggcactctttccaagaaaagatatagaagggagaagaaacattcgagttgtgaacagacagaaacactgtactttttgtaagaattgcaggtggaaacgattctctgtcactttaatgagcatggagaataacaatagacagcaaactaccgttccactcacgactcttgaaaccaacagagtaccagagagttctaaaaacaaacatttttatgtcaagtttcaaaacatacccaagtctttaaaagatatggagtttttgacttttaagtggtaagagcagtgctcatggctcctctctaatctcagttttctggaaggaaaggaaagtacaatatcaactattttg

SEQ ID NO: 50 - DNA, 413 bp, Cyanidium caldarium
  unsure at all n locations
  Clone ID: LIB190-001-Q1-E1-H11
cccacgcgtccgcccacgcgtccgcccacgcgtccgcccacgcgtccgtttcctcttgaggggaaaattgtggttggtcggtgaaaaccatggtggcagcttctccttctcgcaagttggaaatacaatgtggagtattgaaaaggtatcctagattctttgtggatgagtgtgcaactaagaaaccaggaaagaacgttgaaagatatatccgcttatcaaaaggagtttaccgagatgaaggagcanatacaacgggcaacacccgattaaccatatcagcaatggcaaaaagtgttggaagaaacggagagaatggtatcggactcgtataggaggttatcggaagcggtagacagtttacaaaagttgcaaacgcagatggaaaatttgcgagggaacaaagaatggga

SEQ ID NO: 51 - DNA, 438 bp, Cyanidium caldarium
  unsure at all n locations
  Clone ID: LIB190-001-Q1-E1-H2
tccggctgaccncacgcgtcaactattcggcaaacatttcggctaattggtaggcatccttccaattcttctggaaaggatttttacataattccggtaccagttaagggaatcacaatttggcgtcgctggaactattgtgagtaatcacggtgctaggcaattggtcagctctccagcaacgatcgattgtttagactctgttgtgaaaggcgttcggggtaaaatacccgttttattagattccggagttcgtcgcggaacagatattattaaggctttagctttacgtgcacaaggagtgtgtgttggtaggccgatattatggggactctcagttgcaagcgatgtatgcgtcaggcgagttatagagctgtttcgcagtgaattcgacctcgacatgggacttcttggttgtccatctaatgcagatatccg

SEQ ID NO: 52 - DNA, 419 bp, Cyanidium caldarium
  Clone ID: LIB190-001-Q1-E1-H3
ggcagatcatgtcggtctcctttgtggacgtaggttgttggacaatcacttcacggactttgcaacaaggaaaagatttcaagtacacagggaaaggttgcaagtgttgtaagtatcctgtacgaaggggttgtacaagtcgtccttccgttgcgggggtcggtcttgtttctcgtctagaagggaaaaacgacttgttggagcggttcgatgccagttcaaagtatttcaacaaaaagagaaacgacagagaaccagatttttatgcgaacttgggaacagttatcgaaactttgagaagcgactatgctcacattctggagaaggaaattgacctttcggtttatgacgacaacttaatattgcgagaccgcatgcacggtcaatacttacaagggaaggaagcgtacaaaacaata

SEQ ID NO: 53 - DNA, 402 bp, Cyanidium caldarium
  Clone ID: LIB190-001-Q1-E1-H5
ccaacgcgtccgcccacgcgtccgggcaaatacgggaaagcagtaaaagaagaaagagaaaggaaaaaactgagtatcaggaagaaaagagggagtagatgaggaaagaaagatcaaggaagtaagagtaagagaaggagtaatgtgaatgaaagcaggaaagtatttgaagaagagagtgtaaagcgcgtaccttttgcaaaatgtcccaacgagtgaaagaggaagcaaaaagaaagaaaaagaagtagccaggtaagacccgaagctagttgatcttatgctgtccaagcgaagtaaggctgaaccagtatctgtggaaaaagatttgggagaaatggcataaagggtgaaaaggcaatcaaagctaatgaaaactgggactcctcgaaagctagaaag

SEQ ID NO: 54 - DNA, 411 bp, Cyanidium caldarium
  Clone ID: LIB190-001-Q1-E1-H6
ccacgcgtccgctctttgggaagcatgacgtctatttgggaggcatccaaacaactcctttatcattacaaaaacacagttccttaccacttaaaggttatcgacgcttttctcttgtatgtcttttctactgctgccatccagtttgtttacgtcttgttcgttgggacctttcctttcaacgctttcttggcgggtttcttctcgtgtgctggagtttttgtgttgacaggtaaataatacagggatactatatagctgcggttttttccctcacgttatttatctagtggccttgcgcatgcaagtgaatccgcggaatcagaacgcagccaatcgatgggaaaaagtgaacccctaccgtgcttatgtagaatggctgttttgtaacttgattttgcatattgctgt

SEQ ID NO: 55 - DNA, 396 bp, Cyanidium caldarium
  Clone ID: LIB190-002-Q1-E1-A1
gtaggtggctcctattgatagacagctgttatgtcctttaataaactgttgaaaacattggctgatagatatgcgtctcaagcagttcccacaaagactgtggaaggttgggaaacaaccgctgatttacgaaaaaagttgattgcgactcatattaacgctctccctgttcgtttccaacgcgcaagagaagagttgaaggattttgtacaaaagactcgtacgttggactttacgtatcttgatgcgtttcgttttggtttccgaagcttagagttggcggcatggtactggatcggaaagaccttgggaaagagggaacttcccaactcgatatgaagtgtgtcttcggcacctcttcttttctcggaaatacaagcttttatgtgctcgtgt

SEQ ID NO: 56 - DNA, 404 bp, Cyanidium caldarium
  unsure at all n locations
  Clone ID: LIB190-002-Q1-E1-A10
acccacacgtccgtgtacagggaagtatgacccagtaatgangagtggagtaaacagaanaggaagtaanaagagggaatgaagggaagttatggcaaaaacacgtgccagcagcagcggtaaaacgtgtgtagcaagcgtagagcagaagaactgggtgtaaaggtcgagtagtagagtaagtgtaaaagggaaaggaaaggagagaaagaggaaagggatgaaatgcagagatctctagagaaaggcaagaaagaaaagaaaggaagacacagtaaatgaggcgagaaagcatangaagtgaaacggattaagaacccgtgtagtctatgcagtaaaagaaagaatgagtaagaaaaaagggagtcattcccacagnggagtaaangcgcaagaaagaaacc

SEQ ID NO: 57 - DNA, 314 bp, Cyanidium caldarium
  Clone ID: LIB190-002-Q1-E1-A11
gcgtccgaccacacgtccgcccacgcgtccgagagtcgacagaagaagaacctgaagttgtgggtgttcaagttcgaaaaaaggaaactcctaaagcggctgcttggaagagaagttcatttcattatcaaaagatgttacgagatgaggaaccgtggaaacaattgtattatcatgtatggaatgaacacaagtccaagtctgtagacaaagtttgggaacaatttgcagttgctcctagtgaacaaccacaagagaacaatcaccttgtggaacagtggatggatatcgccgtttggaaagaagagaataat

SEQ ID NO: 58 - DNA, 125 bp, Cyanidium caldarium
  Clone ID: LIB190-002-Q1-E1-A12
acggacacgtgggtgcaagtttgcgactacaaatgtgccaacttgcaactagaggacttggcacaagaacatcttttccatttatttcaagtttgaaaacaaaatatttctcgactttacccttg

SEQ ID NO: 59 - DNA, 402 bp, Cyanidium caldarium
  Clone ID: LIB190-002-Q1-E1-A2
cccacgcgtccggatggagaaggacgagcatcatgcagtggcaagggaattggctaatcgcatgcgactcggcacagtatttacagttcccgagagaagactttgctagtgaagaagaatataataattaattagaagcttttgaagatgctgtatatagtttgcgtgaaggaaccaacacagatgaagcccaagcaagtatggagagacttgcaaagtatatcacatacactattacataacaaatactcatgaatccagttttgattgtggatgatgagagcgaagacaagaataatgagagtagcgaacaacaaggagtgacctttgtagatcctgcaagaccagcaaagcctatgcctgctcctttacgagacaacagtcctgtggatgacaagatgc

SEQ ID NO: 60 - DNA, 431 bp, Cyanidium caldarium
  Clone ID: LIB190-002-Q1-E1-A3
taccgaacaggtattcgcgcgacccacgcgtcagcgccattgagcacccgtgatgggacgtgtaatacgaggccagagaaagggagccggtagtatatttcgtgcgcatgtcgtcaaaagaaaaggagcagccaagtttagagcgttggattatgccgaaagacacggatatctaagaggagtcgtcagggaaatcatacacgacccaggaagaggagctcctttggctcgagtggaatttagggatccgtatagatataagagaagagtagagacttttattgcaccagaaggtttatatacgggacaattcgtgtattgtggaaagaaagcccaactagcaatcggtaacgtccttccacttggttccttacctgaaggaacagtcgtttgtaacgtcgaaggtaaaattggcgatagaggaaaaatgg

SEQ ID NO: 61 - DNA, 392 bp, Cyanidium caldarium
  Clone ID: LIB190-002-Q1-E1-A6
agcccacgcgtccgggagaacgatatccttcgtatgcttggcgaagtatattttgagagaaaggattggagcaatgcccatgcctagttgagtcgttgtttgcatcagacaagtctaggagaatcctcgtctcagctgcatcaaccacagtaatgtacgaataatgagatattttgtttgtagttattggactgcatcgaaaaagaaagatggcaaatggaatattgcgttgtcgttggcagtaaaaggtaagagatgattgcattcgtatgcatttggtgtcgagtgctttttggatccaacttcagctcctcatgacgaatatttatataaagctgagtcgtttcgacgacgcatatagctctcttatgaatgttgcggaatgtatagaa

SEQ ID NO: 62 - DNA, 394 bp, Cyanidium caldarium
  Clone ID: LIB190-002-Q1-E1-A7
gggataatgataataggagggatgatagtaatgttaggtaaaaggaggagagaagaggagataataataatgcagatgagtgagggatataagatgataatgtggatgttatgtatgggtaatatgggagtgccgttaacgagtgggtatgtatcagagatgtggataatgtggggaataatgagtgtgagtaaggagataggagtaatgatgagtataagtatgatattaacggtagtgtatacgatatggatgtataaccgagtatataagggaataaggaaggagtatataaagaaggagatggacataagtaggagggagtataacagtataagtccgttagtggtaataatgataataatgggagtgaagccaagtatatggagtgaag

SEQ ID NO: 63 - DNA, 390 bp, Cyanidium caldarium
  Clone ID: LIB190-002-Q1-E1-A8
cccacgcgtccgggttaggaataataaacaggggagtagaagaagggatgaaagagaaatataggagtatgagaaagaaggaggagaaggaagaggaaagaaggagtataaggagagaagtaagtaataggaagagggaagtaaaggaggaggaggtaaagatgaataaaagagagttatggtagtaggaggagtaatgatgccgataataggagggataatagggttaggttatggaagaaagataggagtagaagggagtagtaagataaatataaggagtatgagatggagtgtggtgttgataagtatggagttatatgagagtgtaatagagggagtaaagaaggaagtaaaaatatgggagtggatgagggacggagtagagag

SEQ ID NO: 64 - DNA, 396 bp, Cyanidium caldarium
  unsure at all n locations
  Clone ID: LIB190-002-Q1-E1-A9
acccacgcgtccgcccacgcgtccgcccacgcgtctgcccacgcgtccggattcatcagaagctttctggtcaacaacggcctctggttgctctcgtttctttatgtgtatttctcagggaatatttagacatagcaaggaaggagcttcaagaatccaacgaatacgtgttttatctacaaaatgaaaccaagtctatgaaagacgtagaacccagggatttggctcaacgtcgtataaagcagctaatattgcagaaagacaaactttattctctcttggatgaatttggtagaagatggcatcaacacttggtcaaagaatttcctgangacgaatttccttgggtagtaacaacanaagaggagtcttccatgttcactagggacgggaaaa

SEQ ID NO: 65 - DNA, 410 bp, Cyanidium caldarium
  unsure at all n locations
  Clone ID: LIB190-002-Q1-E1-B12
gacggacacttgggtttggaactaacttgacatgcaacaaattaaccttcgagtatccaaaccttctttgggggcaaccttggtcctcattcaaagtataatcctgtgcaattcatgcagtaacagccgatgaaataacaagtttcgagagaggataccanacagttgcaccaactcagacgcagcaatgtcaaaagatttgtgtcaccgccacacaaactcaagttcaaagttgtatttatactcagacacaggctccgttcatgtctcaatgtgtcacagcattgccaactacctgctataaatacgtaacaaaatataagcaagtgtgctgtgagcaagaatacgagcaacagaattatcaacagcagcaggtttgtcaacagtattgccaactatcggtacagcag

SEQ ID NO: 66 - DNA, 392 bp, Cyanidium caldarium
  unsure at all n locations
  Clone ID: LIB190-002-Q1-E1-B3
agagggaaacatgtcgaagaagcttctggaagactttattgtaaaggggtagtgttgggttataaaaggtcacaacggaatcaatatcctagtcaaaccagaatcaagatacagggagttgaagatcgagcttcgacagcgttttatttaggaaagcgtgtggcatatgtttaccgtgcaaagagaccaagaaagagtgttggaggaaagaaaacaaagattcgagtgatttggggaagaattattgcaccacatggtaatagaggagtagtacgtgccaagtttcgaaacaacttgccaccttctagttttggcaaacgagtaagagttatgttgtatccaagcaacgtataaacaagtgctttaaaattttaaaaaccaancaacgaaaa

SEQ ID NO: 67 - DNA, 410 bp, Cyanidium caldarium
  unsure at all n locations
  Clone ID: LIB190-002-Q1-E1-B4
agaattaactccggaacgttccgatatnntgctgcgggcttttgttgtatttggttaaaaaggtttccaaaaaaattgcaacgggattccccgtaactgtaataatccaagtatggtcacgttaaaaagttagctgaccagattgctgaaggagttcgtcaaaaaagatgtgaagttgttgtataccaggcaccagaaacactttctgaagatgttttgaaactattaaaggcaccaccaaagccaagcgaccctgtattcacctttgacaagcacagcgttttggctgaagccgatggagttctatttggctttcctacacgttttggtatgatgtgtgcacagatgaaagctgtttttgactctttcggacatctatggcagagtggagctttagccaccaaaccggc

SEQ ID NO: 68 - DNA, 402 bp, Cyanidium caldarium
  Clone ID: LIB190-002-Q1-E1-B8
agaggaatggtccatgtcccaccaacaacaacaacaagaagatgatgggacaacctcaaggctagcgtctttgaaaagttatgattgggatatttaccaacgtatcgataacctggagtggttgaatagtgagcaaaagacaatgtggaaagactggttggtagaattgaaaacgagatggaacgacgctttggaacactatgtgagtcgcatggtggaagagttgaaacaacaacaccgattccgtacagtaacggaggaagaaagacaggcgttgattcgtccaattgtacaagcatttgaagatgcttggaagagaattcgcaagatgatggtagaagatgggttgaatagaatgaggagggagacgagagccagtaagagggcacttgtcgagtggtt

SEQ ID NO: 69 - DNA, 399 bp, Cyanidium caldarium
  unsure at all n locations
  Clone ID: LIB190-002-Q1-E1-C1
cccacgcgtccgaaaaggaggtaatgaagggaagttatggcaaaaacacgtgccagcagcagcggtaaaacgtgtgtacaagccttnaacaaaagaactgggttttaaaggccaattataaaatatattgtaaaggggaaaggaaaggagagaaagaggaaagggatgaaatgcagagatctctagagaaaggcaagaaagaaaagaaaggaagacacagtaaatgaggcgagaaagcataggaagtgaaacggattaggaacccgtgtagtctatgcagtaaaagaaagaatgagtaagaaaaaagggagtcattccaccaggggagtaaaggcgcaagaaagaaacccaaagcaattgacgggaatcggaaaaaggggtggatcacgtaaattaatc

SEQ ID NO: 70 - DNA, 408 bp, Cyanidium caldarium
  unsure at all n locations
  Clone ID: LIB190-002-Q1-E1-C10
acccacgcgtccgggaagttgagtgcttttgtcatttgtgatataaagggaaaagattgcctactgaaatgattcaaataaggactgtattaaaagtactagacaactcaggaccaaaaacagcaagatgtataggaattcttggaccacctaaaaagtttgctactgtcggtgacaagattgtagttactgcagagggaaaagtttaccacggaatcgtcgcctgttgtaaggtggaaaagaagagaccggacggttcctttgtaagaatcgaccagaacggagtcattctagtagattcaagtggaaagccagtgggaaacagagtatttggtgttttgagcagtagagtgaagcaaccggaaattctctccttgngacgcgttaaaaccatgtaagctttaatag

SEQ ID NO: 71 - DNA, 420 bp, Cyanidium caldarium
  Clone ID: LIB190-002-Q1-E1-C11
caaaccttcgggaacaagaaaacggcggccttggtggatggtacaaggcttttggctttcaaaaccaaattacggcaaccctaaaaccaatccccggaaaaagctaaaattccagccaatcatatggaaatgctggagcgtcgggttacgccgatgtatttccattatcaacaaatattccagagattgaagtagggagtgctgcctcctctggagacggggggagagctcattcaacagagtttgccacgtattcgcagggctactcatatcaaactccggagtactttcctgaatttgtgcaaccttcgtctaatgaagactatgaatacgtcgcaccttatgggaatccggagtattattggaacccggagtattattggaacccagaaggattatactacccaagcactactaatg

SEQ ID NO: 72 - DNA, 416 bp, Cyanidium caldarium
  Clone ID: LIB190-002-Q1-E1-C12
agttacttttaaagatgttgctggtttagatgaagctaaggtggagatcatggagtttgtcgatttcctgaagaaacctgagaaatatcgcagattaggagccaaacttccaaaaggtgctttgttggttggtcctccaggtacgggaaagacgttacttgccaaagctactgcaggagaggccagcgttccattcttttctacaagtggttcagactttatagaaatgtttgtgggagttggtccaagtcgcataagggatttatttgcacaagccagagccaatgcgccttgtattgtatttatcgacgaaattgacgcagttggacgtgctcgaggcagaggtggctttgctggaggaaatgatgaaagagaaaatacgctcaatgctttgttggtcgaaatggatggattta

SEQ ID NO: 73 - DNA, 180 bp, Cyanidium caldarium
  unsure at all n locations
  Clone ID: LIB190-002-Q1-E1-C3
acgaaaaacaagaggaaatcctttctttggaaaatgagcaaatangaatatatggattttacaagacaagccacttgtgaaaaatatgccaaaaaaggcatcttgtggacaacgttggtcgccttgatcgttggactagtcacagacgattacctgcgaatggttcaagtatttaaattg

SEQ ID NO: 74 - DNA, 283 bp, Cyanidium caldarium
  Clone ID: LIB190-002-Q1-E1-C4
ttgggtttcttttctttggtatattttttttataaaaaattttctctttaatcactatcataagtatagctggtatgccataatccgcatcttgtggtcaacgtatggctgcttgatcattggcctagtcacatatgattatttgcgaatggttcaagtatttatattgggaataatttttgtatctatgggcttacttttctcctgatcatggtatacatgacatccacttgtgtttgtccattcagcaaccaaaattatcgattctaacagccattcttaa

SEQ ID NO: 75 - DNA, 434 bp, Cyanidium caldarium
  Clone ID: LIB190-002-Q1-E1-C5
taccgtattaggaattccggcgtcaaccaagcgtcagcgagcctgaaagaccctggtggtggaggttggatgattctgcaaccactgccaccaaacgtaagagtagagtagatgtttctcaaaatagactgcctttatcggaaaccttatcacctaaggattcttatgaggagtttcccaactggtttctagtagaaaaacaacgtctcagtgagctcgaagagaaaatgaggttgtgtttgttttcgatttgttattgtttggttttttaacacttgtgtcaaagggactcgacgattcaggatgtgcctgttctaaaggctttgatggatacgaaacataactgaatcatgtatcaatatgaaaatgctaacttggacttgatggaacgtatctatcgaatgaaaatgccagagtcgaagaactttggatgt

SEQ ID NO: 76 - DNA, 395 bp, Cyanidium caldarium
  Clone ID: LIB190-002-Q1-E1-C6
agcggacgcgtgggcggacgcgtgggtaggaatttcgaaaccgtcgtttcagtttgtggcttgcttttcttttctttcatgaatgagcatagactttggacacacttgacgatttcaggtttggagcaggtgttagacctttctcctcgttttggattccctgtgttacctgtgatcgttattttacacacactaaagtcgtcaaggtgttggtttcgaaactaaaaggccttcgatcccctgcattattggtattctacaatggatgtcgaagttgcttcacttgcattctctttattgctcatggtgcagttatgtttgaaaagtccaaactctatatgcctcatgagttggtttgcggctccgctacccagcaagatggccgcctccatttt

SEQ ID NO: 77 - DNA, 394 bp, Cyanidium caldarium
  Clone ID: LIB190-002-Q1-E1-D1
ggacaaaacgttggtgcagcaacaacaacagtttgggttttctagttgccattcactgagtacaacgtgcattgatcagctagtacaataacacaatggcgttgctcaatcttgttcgcctgtctcgaagattttaccgcaacgaggcttcggtagcggaaaggcaacagagtatgatgcacagcagtctccacgtagttgtctgttgagctccacatgatcacttgcttccaataatgcatcgctttcaataataggaaccatttcatagtgttaataaatggaagcatagcatctcaccaactctgcattgacttggatagcaagtgaaggactatgatcattcacaatacgaaaagctggtttccatttggtaagttttgctccttgtttc

SEQ ID NO: 78 - DNA, 412 bp, Cyanidium caldarium
  Clone ID: LIB190-002-Q1-E1-D10
aggcattgtgccgtcgaattctcggcaaagaggttagaagagctctaaagagtcttctggcgcaacagagaatggatgcactgaaatgtcatcctacagagaaggatattgagggtcgcgaagtgaagccgttgattgacgactttcaacaacgcaagatggatgatagtgagcacgtcggagtcttcacgaatcgaatgagaaaaggaagaatctcagttccacctgaaacgactgagaatgccgaaaacagttgttctgaccaagtaactaccgagatggaagagtcgactgcagcacaacccgaagttttggatgtggataaggaagaaaacgagtttactcaagactttgatgagttggaagaagagaagaacaatgatgacggcagtgaatgtaatgaagaggactc

SEQ ID NO: 79 - DNA, 397 bp, Cyanidium caldarium
  unsure at all n locations
  Clone ID: LIB190-002-Q1-E1-D11
tggcaaccttggctccaaaagctccccgggcaacaacttctcccttaaccaacaacaaaggtgatttctccccaagaatggagcctaacttcacaaaaagcagtgccactgcaacaacaacaccggccacctaccggagtagcaacacaagcgcctcctgagccacctccacctcctccgccaatcaccagtactcgagctttagtgacaccttcaggtactttcacagtataagaacccggttccgcaaaggaactgctcaactcgacaccagaatgtcctcnctgagttgcagaagagacatcagagtcattgtgaaaaagacgttccaaccagttttcttccaaatatccttgaaactggacaatgttactcccttgctgggactcgtacaacc

SEQ ID NO: 80 - DNA, 421 bp, Cyanidium caldarium
  Clone ID: LIB190-002-Q1-E1-D12
acggacacgtgggctcgttgttgtctttcacttgaaaatggtatacaagttcagaacaaatgttatgaaaatgatggaaaagggaatcttccgaaaggcaaagtggtatgatgttgtacagaagtaccctccgttggctcctccaggaaatcgtcgcaaacctcctcgcatcgttcttgaagaagatagtttgtatgaagaactatacgagaacattccacaactacagtatactcctctgaacattggtcagtcactttatggagacaggaacgtatgtgataagtttgtttattttcaaaaattgtatatggatagcaagggtatgagtaaaaaggaggcttttgacacagtaagaaaggaacttgataaagaactggaagaagcacttcgccagtcgtcctcactgtattggaatggg

SEQ ID NO: 81 - DNA, 399 bp, Cyanidium caldarium
  Clone ID: LIB190-002-Q1-E1-D2
agggcttggatggcagtaaagttttggcgcactttcctcctgctgatacatacaactctttgggaaccgtccatgaagcgcttttatctgtttcaaacaatcaagaaattggtgtttataacgcttctcttatgttgtttggccacggagatggaggaggtggacccactcctgccatgttggagagtccttctcgtatgcgagacttagcaagcctaccccaagtacatctggataggacacctacacagttttttgaagaaatgcagaagcaccaagatgagctaccaatctggtttggtgagttgtacttggaggatcacagaggaactttgacaagtcagtcgtttgtgaaacgaaacaacagaagagcggaagagatgatgaaggaaattgaac

SEQ ID NO: 82 - DNA, 397 bp, Cyanidium caldarium
  Clone ID: LIB190-002-Q1-E1-D3
aggaagagtttgtacgagcgttcctcgtacgttttcaagtttccgatgccttggctttgattcggttggacgacttgtttgtggacagttttgagattcgcgacgtgaaacctttacatggagaccatcactctcgagctattggtagagttgctggaagagatgggagaatgaagtttactatagaacatgcaacgaagacacgaatagtattgacggatacaatggtgcatatattaggttcataccaaaatattcaatttgcaaagaatgcagtagtcagtcgtattctaggttctccacctggaaaaatacacaataagctgagaaccgttgctgctcgattgaacgagcgcttttgaagccgacgaaatgtcgaaatgtattttgtcgcttg

SEQ ID NO: 83 - DNA, 340 bp, Cyanidium caldarium
  Clone ID: LIB190-002-Q1-E1-D4
agaacacgcgtccggaaagaggcaaatacgggaaagcagtaaaagaagaaagagaaaggaaaaaactgagtatcaggaagaaaagagggagtagatgaggaaagaaagatcaaggaagtaagagtaagagaaggagtaatgtgaatgaaagcaggaaagtatttgaagaagagagtgtaaagcgcgtaccttttgcataatgtcccagcgagtgaaagaggaagcaaaaagaaagaaaaagaagtagccaggtaagacccgaagctagttgatcttatgctgtccaagcgaagtaaggctgaaccagtatctgtggaaaaagatttggaagagatggcat

SEQ ID NO: 84 - DNA, 397 bp, Cyanidium caldarium
  Clone ID: LIB190-002-Q1-E1-D5
tcataatagaaatccgaaaggagtagaagaaaagagagagaagaaagaaaagaagagaaaagccgtactgaagaccgacacaggtactcgaggagaaaggagacccaaattaaggtgagagaatggacgataaggaactaggcaaaaggatatggtatctgcggtagaacatatgaaagaagcagcaccgactgtttagcaaaaacacagcactctgcagaaaagagaaaatgtaaagtatagagtgtgcggcctgccaaatagtagagaagaaatcgatgaaagtgaaagcgagtaaaagatgaggtatagagaatggcggtcctaactgtaaggatccaaaggtagcgaagtaaatagacgtttgaaaggcgtccagtatgaaaggagaaacgag

SEQ ID NO: 85 - DNA, 400 bp, Cyanidium caldarium
  unsure at all n locations
  Clone ID: LIB190-002-Q1-E1-D7
agcccacgcgtccgcccacgcgtccggggagtaagatagagttaatgggaagggagatagtagagggaatagatcgtaagatattggaagaatgtggaaggaaggggagtaaggagataatggaggtaatggagaagggagtaagaaggaggggtaatgtgagtaagtattcgatgggaatgataatagggataataatgtggggatggagttgtggataggaatgataagtccatggaaaggagagaaagaggaaagggatgaaatgcagagatctctagagaaaggcaagaaagaaaagaaaggaagacacagtaaatgaggcgagaaagcatangaagtgaaacggattaagaacccgtgtagtctatgcagtaaaagaaagaatgagtaagaaaaa

SEQ ID NO: 86 - DNA, 359 bp, Cyanidium caldarium
  Clone ID: LIB190-002-Q1-E1-D8
ggaaaggggaacttgctattgtttcggacgagggcgtcgctccttatgagagacctgcactttccaaggggttcctgattggaaacccgcctgcaagacttccaggttttcatacttgtgtgggttcggggggagaacgtttaccaccagagtggtatcaagaacacggcattgatttgttgctttccaatgcagttactagtgtcgatccttctacaaagaccttgaagttgtcttcaggagatacaatttcgtacgataagttggttgttgcaacaggatgttcggcaatgaagtttagtgatcttggtttccctggtgcagattatcaaggcattcattatcttcgtaatatacac

SEQ ID NO: 87 - DNA, 425 bp, Cyanidium caldarium
  Clone ID: LIB190-002-Q1-E1-D9
acccacgcgtccgagacgcggttctttagtaacaattttaggaaaagtagctaccggagtatgggctcaaaaagggacaacaagggtctgttctctatgatatatcacgggttgatgtctgctctttttctgcttggtggtctaactcttgttggtgtgggaatatatgctgaagtaactcattctggaaagtttgacttggattggacgagtagcttttggagtgctgtgacgaactttggaatagctgccatcatagttggagccacgttggcagttattggagctattggttttgtagcatttaactctggtttttgtgggaaattcttcaagttgatgtatttcattcttttagttgcagtattccttgttctactgtttatggccatagttacgcttatgttagccaacggagataatgt

SEQ ID NO: 88 - DNA, 423 bp, Cyanidium caldarium
  unsure at all n locations
  Clone ID: LIB190-002-Q1-E1-E11
aaccaagccttcgacggaaccttgggttaacttggaccttaatcctggtaaacaatttcgaacaaaatggtgccctgggtaattgccattggtccggttatggtaaaaccaggatttgcagggaacaatgctccccgttccgtcttcccttcaatcgtaggtcgnacaagacaccangctattatggttggtatgggacaaaaggaaagttatgtgggtgatgaggctcagtctcgaaggggtatactctctttaaaatacccaatagaacacggtattgtcactaattgggatgatatggaaaagatatggcaccatactttctacaatgaacttcgaattgcacctgaagagcatccagtcttgttgaccgaagctcctctcaatccanaggcaaacanggagaaaatgactcagatcatg

SEQ ID NO: 89 - DNA, 403 bp, Cyanidium caldarium
  unsure at all n locations
  Clone ID: LIB190-002-Q1-E1-E12
attatgatggacaagtagcaagtcttcctacgctttacttatgaaaaagtcgacgagtgctgtgacaggtagaagaacttgggacaaggcttttttcgaaaagaaaagtgagcaacanaagaaagaagaagatgaatacgaaaagaacgaaagagaacgcgccaaaaaggcaaaacagccacaagaaaacgaccagtttgcacctacgaggtcgtggcttgaaagaagagactatcagttggactttgaaaaacgagttggaaaggctacagtggtttcttcactgagagataaaaatagcggtttttactgtgaaatatgtaaagtgttacaaaaagactccaacgcatatttaaatcacctcaatagtcgaatacatcagaagaacttgggcatgtctttg

SEQ ID NO: 90 - DNA, 300 bp, Cyanidium caldarium
  Clone ID: LIB190-002-Q1-E1-E2
agagagatcgcgtattgaatgctattcgaaagcatacagttcctagtggtatgtttacagaggagattgatcgatatactggtttcgagcaaggagctatcaatttaacttggagttatgatgcctttgttactgcggtttggtcgagagaagatgttcacaagttgttttctaaatattgtgaacctccttctccacctctacctagtatgccaggacctggtggtttatcttctccataataagaggcacttgtgcactttggatatttttgtggttcacataaagacaagctttatt

SEQ ID NO: 91 - DNA, 263 bp, Cyanidium caldarium
  Clone ID: LIB190-002-Q1-E1-E3
cccacgcgtcacgaaaaaaaaactgaataaaacaacaccaaatgtaaaacaatcaactcgaaaaatcatttggtacaggttgcatgaatgggattgccgtcccatctgtgctctatgatactgggctcgagcttacaaggtgtcgtctcttcaaggatttaaccggtgctttccatcacggtctgacgcttttatcacattccatcgtcggtatttccctctttcgttagccgattttattcgccttgtgccatgatccctcc

SEQ ID NO: 92 - DNA, 398 bp, Cyanidium caldarium
  unsure at all n locations
  Clone ID: LIB190-002-Q1-E1-E5
agcaggatgagtgtcaggtatctccaaatttgtgcaacggcttcaagaagtcttttgtcaaaggaatctaaagggttttgccgatatttgcacgctacgaaagtctctcaggcgtctaatgtgatgtgccgagatgcccttaacagtgcgcttgatgaagaacttgaacgagacgaaagagtttgtattattggagaagaagtaggacagtaccaaggcgcctacaaagttactcgtggcttgtatgaaaaatatggttcaaggagaatagttgatactcctatatccgagatgggtttcaccggtttggctgtangagctgcattcaacggactaagacctgtttgtgagtttatgacctttaactttgcaatgcaggcgatcgaccagatcatcaa

SEQ ID NO: 93 - DNA, 396 bp, Cyanidium caldarium
  Clone ID: LIB190-002-Q1-E1-E7
agcccacgcgtccgcgttgagtccaatcgttgttgtggttttttggtaaaaaatgtctgctgaaccagtgggaaagttaaactctggtgcaactattcctcttcgtggctttggaacctggaaagctgagcctggagtggttggtgaatgtgtgaaaactgcttatgacgtcggttacagacactttgactgtgctgctatatatcagaatgaaaaggaaattggacaagctttttcagaacttttctccagaggagtgaagagatcagacatatttgtcacttctaaagtgtggaatacctgccacgatcctcaaagagtggtcgaagcttgtaaacaaactctgcaagatttacgtctggattatctagacctttacttggttcactggccttg

SEQ ID NO: 94 - DNA, 399 bp, Cyanidium caldarium
  Clone ID: LIB190-002-Q1-E1-F1
cccacgcgtccgcccacgcgtccgtgaaagtaaaatcccgaaacactatattgtctcacctcctcatatcgaaaggacccttggagaatatttggtgcataatggatgtcgacgtctctccataagtgagactcagaaatttggtcatgttacctatttcttcaacggaaatagagcaaacaaatttgatgaggaactcgaactttatgtggaagttccaagcagcagagaaagagaaaatactcgtccttggatgaaagcagcagaaattaccgactctgctttggcagccatagatgagtttaaacctgattttgtagttctaaactatgcaaatggagatatggtaggacatactggtgattataatgcagctgttatcgccatggaagcagtgga

SEQ ID NO: 95 - DNA, 424 bp, Cyanidium caldarium
  Clone ID: LIB190-002-Q1-E1-F11
cccacgcgtccgcccacgcgtccgcccacgcgtccgggggcctaagcaaaaggacacaaggaacttggagacttgcagatgtcattgtcgaagttttgtatcggtttctttaaacccgcttccatcagagcagtggtcactttacataatgccacgttcaagcgcttactgcacgacagagcgtttcttatggaggaagcttcaggtggagcacagggcgctacgttggattcaaaggaagtcaccgatagagttctctccgtagtaaagaagtttgaaaaggtggatcctgccaaagtgactccgcaatcccactttgtgaacgatttgggactcgatagtttagatacagtagaacttgtgatggcttttgaagatgagtttgctatagaaattccagacgcggatgcggataagattctat

SEQ ID NO: 96 - DNA, 379 bp, Cyanidium caldarium
  Clone ID: LIB190-002-Q1-E1-F12
cgaccacgcgtccacccaagcgtccgcggacgcgtgggcggacgcgtgggcggacgcgtgggttacgggtgagttgtggtgctgtctaaagatgcgtttccccctgtgaaggtggtctatataagtcaacttggaaactttaatactggttatattcactagatattgtcaaaaagtagctctcgaaccgacgaccaaccatccacgcaattcatatcgagactgtcagcacaactacgaccatgccaaccatgtttgttgtgacacattggatagtcaagcattttgaggaatccttgcatataagaaacgtgtgttcgccgatgaaattgaggaaaaagttgtagttctgaaatggttcgtactcgtgccagcgtat

SEQ ID NO: 97 - DNA, 341 bp, Cyanidium caldarium
  Clone ID: LIB190-002-Q1-E1-F4
cccggggccaaccaagccttcagacaaggcgtcggcaaaagtataaggaggttactcagcaagaatgccagtacgtccaaaagtcgtattgtgtcgagtatgaagaatgtcagcaagttacccaggaagtttctccttcagaaattgtctactacggtgaatcttcttctagcagtagttactactactagaacacttgtgaaatgcgcaaagtcgcaaagtagagtgttcttttttgaataaactgttactttttgtcaaaaaataaaaaaaaatgaaaaagaaaacaaatcataaagcataaaagaaagcaaacaataacctgaaaagacaagtatagg

SEQ ID NO: 98 - DNA, 404 bp, Cyanidium caldarium
  Clone ID: LIB190-002-Q1-E1-F5
agcccacgcgtccgggagggaatgaagggaagttatggcaaaaacacgtgccagcagcagcggtaaaacgtgtgtagcaagcgtagagcagaagaactgggtgtaaaggtcgagtagtagagtaagtgtaaaagggaaaggaaaggagagaaagaggaaagggatgaaatgcagagatctctagagaaaggcaagaaagaaaagaaaggaagacacagtaaatgaggcgagaaagcataggaagtgaaacggattaggaacccgtgtagtctatgcagtaaaagaaagaatgagtaagaaaaaagggagtcattccaccaggggagtaaaggcgcaagaaagaaacccaaagcaattgacgggaatcggaaaaaggggtggatcacgtaaattaatccgatata

SEQ ID NO: 99 - DNA, 400 bp, Cyanidium caldarium
  unsure at all n locations
  Clone ID: LIB190-002-Q1-E1-F6
agaaatgacctcgagtggatttgttctcgtggttccttttcagttgactcgcggtcgacttgaagcaaaatatcctaaaaaaagctttgttcgcaagtctcgttgcttgaacagttctcctcctcctccttcttgttgttgtcaaaacaagttgtccaataaaacgtgttgtgatagacgcaagtttttgaatgatttggtatggacaacgaaaagtgtggtggtaacaagtgcgagttattttctcctgggtaatactactgcttgggcagcgaaagaagaaaaacaaagtgtccctgcagcagttgccaatcaagtggagacatacaaagacttggtaaaaggttataanatattgcggccgataggttggaatcaatttgctggacaacgaaaccaa

SEQ ID NO: 100 - DNA, 399 bp, Cyanidium caldarium
  Clone ID: LIB190-002-Q1-E1-F7
agcccacgcgtccggctgttcctggtggccttattggagtcggaaccaagattgatccaaccttaaccagagcggatcgtcttgttggtcaagttttgggttcatttggagcattacctgatgtatatcatgagttggaagtgaatttctttctgttgagaagacttttaggagtgaaagtagatggtcaaggcaaattagccaaggtacaaaaactggccaaaggagaagtattaatgttgaatattggctcgacaagtacgggaggaagagtacttgcggtgaagggagatttggcaaaactttcgttgacgagtcctgtttgtactcaagtgggtgaaaagattgcgctttcgagaagagtagaaagacattggcgtctcatcggttggggtcaga

SEQ ID NO: 101 - DNA, 401 bp, Cyanidium caldarium
  Clone ID: LIB190-002-Q1-E1-F8
agcccacgcgtccgcccacgcgtccgcccacgcgtccgccactggtcatggaggaagaagcgttattcaagtaagcaggttgtcttgtggttgtaatatcacagagaatttctagttatgtgaatcaacattcggaagaatatatacaccgtttaagggaagccgttgctctggattcagttagttcggatcccaataaacgctcacgttgcttggatatggccaactatatttgcaaatggatcgaaaaattgggaggaaagcctatcgtaaagcatataggcaagcaaacgtttcctgatggccaagttttggactatcctcccatcctatttggagactttactggtggacacaaggagaaaacagtgctcttggcctattgtcattacgacgtccaa

SEQ ID NO: 102 - DNA, 343 bp, Cyanidium caldarium
  Clone ID: LIB190-002-Q1-E1-G1
gacatgtctagctggaaggaacgactagactcgtggattggaaggagtagcagtgaatattccaaaggtggcaactcttctccagaagggggttcatctcctaaattgggtagcagtccttcgaaactaagcaaaagtcctcgcgctcaagaagtttggagtaaaacagtgcatccttgggggcgttcttactcaggaaagaaacgttatgacaccgtggagaaggacacagagaaggaaccaagtatatttgagatacatgatctgtccaagaaacagagtggcagccaataagaagagagtttgtgagttttcaatacaatactgtgcttgttgttaaaaa

SEQ ID NO: 103 - DNA, 398 bp, Cyanidium caldarium
  Clone ID: LIB190-002-Q1-E1-G10
agaggagatatttttcgcatccagctggagactttgttttgtatatttggagaattttcatttcagcagtgtctcgttttctgtaatgacaaatccatattggatagatattgttacgagttgagaaaagctggattctctgcagattttactagtggagatctgaaacagtcgacgagaaatgaaatatttcgacgcttttatacacacaaaactcaagtcttgtttacaacggaccttttggccagaggtattgattttgtgaactgtaatttggttgtgaatttagatattcctcgaacaggagagacttatttacatcgagcaggaagagctggacgctttggaagatttggaaattgtatcactctctattcatcgacaacacgttctgacat

SEQ ID NO: 104 - DNA, 225 bp, Cyanidium caldarium
  unsure at all n locations
  Clone ID: LIB190-002-Q1-E1-G11
ggcccacgcgtcggcccacgcgtccgtcaaagccagaggtgcttcttctgccgcttctgcagctgcggcaatagtcgatcatatgagagactattggcatggagctggtgaccgatggtgctctgtaggaattcctancgatggaacttatggaattgatgaaagactttggtattcattgccggtaatgtgtcctgttggacattatagacggttcttgaacct

SEQ ID NO: 105 - DNA, 402 bp, Cyanidium caldarium
  Clone ID: LIB190-002-Q1-E1-G2
ttgggatgccgcagaaaacgatgatgggatacacctctcccgagcaagcgctgttgcagttagcatccatcaagaaaaccaccaaaaagttaaagaagcacttgcaaaaatacttggatgaaacaaacactaagaacacagaagatgcagaaccactggaacgtgcaaaggcaaacctcaatttggcatatatatcggcggcccttttctacatgcttcttcgagttcacggggtggaaacttcaggacatcctagcatggaagaactgcaaagaatcaaggaacgttttcaagtgctccgaaagttaattggacaagaagatactcgttcactgggtatagatggtgaggcgacgggtaggattttagcagccactctgaaagatctctcagcggacaaaa

SEQ ID NO: 106 - DNA, 401 bp, Cyanidium caldarium
  Clone ID: LIB190-002-Q1-E1-G5
agcggacgcgtgggcggacgcgtgggctacaatgggaaagttacaagtaggagacgaagcacctgactttgagttgaaagaccaagacggtaatatagttaaattgagcgagttcaaaggaaaatatcctgtagtcctattcttttatcccaaggacaagacgtatggctgcacacgtgaagcttgcagtttccgagataagatgtcggaatttaacgaacttaatgcgaaagttttcggtgtgagttcggacagtgtagagtctcacaagtcgtttgccgatgaacaaaagttgacgtttcccttattatctgatgaaggcggtaaagtacgcaagctatacggtgtaccaaagagcatgtttattatgcctggtcgctgcacttatgtcattggtccgg

SEQ ID NO: 107 - DNA, 405 bp, Cyanidium caldarium
  Clone ID: LIB190-002-Q1-E1-G6
agagaatggcggtcctaacagtaaggatccaaaggtagcgaaacaagagaagggaagtaaaaggtaagaaagaggaaaggtttacgagagaaggaagtagaaagaagagagtgtaaggcggcgtcataatagaaatccgaaaggagtagaagaaaagagagagaagaaagaaaagaagagaaaagccgtactgaagaccgacacaggtactcgaggagaaaggagacccaaattaaggtgagagaatggacgataaggaactaggcaaaaggatatggtatctgcggtagaacatatgaaagaagcagcaccgactgtttagcaaaaacacagcactctgcagaaaagagaaaatgtaaagtatagagtgtgcggcctgccaaatagtagagaaggaagaagcag

SEQ ID NO: 108 - DNA, 400 bp, Cyanidium caldarium
  Clone ID: LIB190-002-Q1-E1-H1
cgatgactttgacaaaaatggctttcatacgggattttgctactgtggatttgaattccagagaatggaaaatgagtatctcagaaagagctttcaattaagggaagaagatggaggtgttctggtgaaaaggattgctcccatatctccctgtagcaaagtacttcaaaaaggggacgtggttactcactttgatggtgttcctattgcaaacgatggaacagttgcctaccgaggtggagaaagaatcaactttcactatcttgttactttgaaatttgtgggtgaaccatgcaccgttcgtattatccgtgacgggaaagaaatggaagttacttatcctttgtttgaactacctttattggtaccgatacatgagaaaaggtccgttcctgaatac

SEQ ID NO: 109 - DNA, 396 bp, Cyanidium caldarium
  Clone ID: LIB190-002-Q1-E1-H10
atggatatttttgcccttgttctcgcgttcctattggaaccaggaaacagttcacatctcaaaggctttctttatttctagttcctggagttggtaggttatattcaagcagaaccaaagtaaacaccaatatttgcacgaaaaattgtttccccgctctaaaaaggctttctggtagtgatacttacaagatgtctttttacaacccagtcttggcaaacttcaagtggtcatttatcgtaaactctgcaatattttcagttttgttgttcaataaccaacgggtattgactcgaaggggtgtaattcacgcatacgtcctagggttgttgctctggtgttgttttggttatgctggttggtcaacttgtgtcctgtttctcgttctaaggtcac

SEQ ID NO: 110 - DNA, 359 bp, Cyanidium caldarium
  Clone ID: LIB190-002-Q1-E1-H11
cccacgcgtccggaatcacggcatatgggaaagccaagcggaacagcgccaaggcttctaaagataagaaacaaaagcaaaaaacagttgtaacaaacattcaagagagggaacaggaggagagaatcttgaaagagtttgaccttaattatcaatttggaccttgtgtctgcattgggagactaactcgctggaaacgcgcacagtcacttggtctgaaccccccaaaaatagttttggcaatattagaacggagaggatcagaagtggacgaagatttgttccaaacgtataagaatcttatttaacttgtttcaatttatgtgaatataataaacttttgaaaacgttgtttggat

SEQ ID NO: 111 - DNA, 206 bp, Cyanidium caldarium
  Clone ID: LIB190-002-Q1-E1-H12
agaaacgctttcagctatcacatcgactgctcgatgatagcgaatcagatgcccgttgcgcaacccatcgcacttgtcttcgttgatcaacaccacaggtaaccgtattttgtataaatgattgggaatacatcgaacaaacaaaaaaataaaaaaaaaaaaaaaaaaaaaaaaataaaaaaaaaaaaacaaaggaaactaacaaa

SEQ ID NO: 112 - DNA, 400 bp, Cyanidium caldarium
  Clone ID: LIB190-002-Q1-E1-H3
cccacgcgtccgcccacgcgtccgggaagaggaagaagaagttcaaggcttttctttgcgagtttcagaaaatttattgagaaagttgacttcagcccctgaagaggtgaaagaatctcgagttgcagttgaaactgatcgtgataggcagttagtagaagcagtacgagaagaagagagaaataagagaagacaacttgtcgaaaggtttcgagagaggcaacaacgtaaagctagacaaagggaagaaagagaaactgctctcgtgcaagcacttgttcaggatctccaaagatccaactttcgtcccaaaatgaagaccgtattgtgtgagtcagaaagaaaggcctgcatggaatgttatcgagagaatccaagtgatcctttacgttgtgcagaa

SEQ ID NO: 113 - DNA, 389 bp, Cyanidium caldarium
  Clone ID: LIB190-002-Q1-E1-H4
cgggagcataatccgatgattggtttccgtggagcttctagatattaggatccccgatataaggaaggatttattatggaatgtaaagcactaaagagagtgagagacgagatgggactcaagaatgtgaaagtaatgattccattttgtcgtacagtagaagaaggcattcgagttgaagaaataatggcagcacaaggcctcaagcgaggtgaaaatggactggagatttatgtcatgtgtgaaataccttccaatgtcattatggcagatgagtttgccaaaatatttgatggtttcagtattggatccaacgacttgacttctttagtattgggcttagatagagataacgaaattattgcacatttgtatgatgaacgaaatcc

SEQ ID NO: 114 - DNA, 401 bp, Cyanidium caldarium
  Clone ID: LIB190-002-Q1-E1-H5
agcgttaaagcatgaaagaaaagaaatccgaaaaagaagagaaaaaggtaagaaagaggaccgaatcagggtaagaggtagaggagcaagaagagaagagagaatgctgggtggagtagcgaaacaagagaagggaagtaaaaggtaagaaagaggaaaggtttacgagagaaggaagtagaaagaagagagtgtaaggcggcgtcataatagaaatccgaaaggagtagaagaaaagagagagaagaaagaaaagaagagaaaagccgtactgaagaccgacacaggtactcgaggagaaaggagacccaaattaaggtgagagaatggacgataaggaactaagcaaaaggatatggtatctgcggtagaacatatgaaagaagcagcaccgactgttt

SEQ ID NO: 115 - DNA, 302 bp, Cyanidium caldarium
  Clone ID: LIB190-002-Q1-E1-H7
agcccacgcgtccgctcatttgtgtctgctttgaactcgtcgtttttccgatatattgatttgcaaatatgaactttaaagtgcgtttgtgtgacattcagaagaatcgtgtaaatttgacaaccttccttgcacctcaagatagtgtctcatatgctgatggcgcgtttataatatacatactgaagtgttgaagcaaaagtatttcgctcgtttttactcggtacgtcacatagatttggttgaagttgctctgtttgtgctaggcatcttggcaataaaggacaattatgttgagtttt

SEQ ID NO: 116 - DNA, 402 bp, Cyanidium caldarium
  Clone ID: LIB190-002-Q1-E1-H8
agcccacgcgtccgcccacgcgtccgcccacgcgtccgcccacgcgtccgagagaggaatcgatcaagcagtcaaggcagttacagagaaacttagaagtatgtccagaaagattaattcgaaagaagaaatacaacaagttgctacgatatctgccaacggagatgaagaaataggcagtttaattgccaaagctatggaagctgttgggagagaaggaacgattacagtttctgatggaaagactgtagagaatgaattggaagtagtggaaggactcaagtttgatcgtggctatatttcaccttattttgtgaccgatgcaaagacacagaaatgtgaatttgagaatcctctcattttatgtgtcgagaagaagatatcttcggtgaatgcaatgct

SEQ ID NO: 117 - DNA, 411 bp, Cyanidium caldarium
  Clone ID: LIB190-002-Q1-E1-H9
gatcgtagcagctgcagatataagtcaacatatttccactgccggtacagaagcttcaggtacctctaatatgaagttttcattgaatggtggccttatcgttggaactttggatggagccaatattgagattcgggaagaagttggtgaggagaatatctttatatttggattgaatgccgagcaagtagaagaagaacgaaagaaacttaatccttcttatgtgctgaatgagaagcttgcaaaagtattggaatggatagagtctggaacgatggtagatgctaagaaacatcaacccattgtggattcactaagaggaggaaaagactggtaccttgttggtgcagactttgaatcttatttacaaatacaagaagaagtggaccgcgtattccgagatcaacccga

SEQ ID NO: 118 - DNA, 417 bp, Cyanidium caldarium
  Clone ID: LIB190-003-Q1-E1-A1
cacacgcgtccgaagaagagcgtgcgtggaggatggattccgttattgcactagttgggaaagactttgttttatcagcagcagatactgccaacgcgcgttcggtcatagtaatgaaagacgatgtggacaagatattggagctggatagtcataagaccttagctatgggtggggagccaggtgactttgtgcagttcacggagtatatacaaaagaatcttcacctttacgaattccaaacgggattgcaactaagtactcacgcagttgctaacttcatccgtggggaattggctagattgatacgggaagcccccgtattaaccaacctacttttggggggttatgattctgtgtccgggccttcactgtattacatcgactatcttggtactttggaaaaactagactata

SEQ ID NO: 119 - DNA, 383 bp, Cyanidium caldarium
  Clone ID: LIB190-003-Q1-E1-A11
cacgcgtccggaggcgtcataatagaaatccgaaaggagtagaagaaaagagagagaagaaagaaaagaagagaaaagccgtactgaagaccgacacaggtactcgaggagaaaggagacccaaattaaggtgagagaatggacgataaggaactaggcaaaaggatatggtatctgcggtagaacatatgaaagaagcagcaccgactgtttagcaaaaacacagcactctgcagaaaagagaaaatgtaaagtatagagtgtgcggcctgccaaatagtagagaagaaatcgatgaaagtgaaagcgagtaaaagatgaggtatagagaatggcggtcctaacggtaaggatccaaaggtagcgaagtaaatagacgtttg

SEQ ID NO: 120 - DNA, 399 bp, Cyanidium caldarium
  Clone ID: LIB190-003-Q1-E1-A2
cacacgcgtccgcttgaatttttctttggtgtttccttggcacatatattttgttttcttctctccagcataattggctactggaactttgacacaaagagctggctttcgaataatattttgggctcgagtatgtcagtattgggaatcgaattgcttgcgttgggtgatttcttgagcagttgcattcttctgtttggtttgttcttctacgatatcttttgggtctttgcttcgaagccagtatttggcgctaatgttatggtcaccgttgctaaaagctttgatggacccatcaagttgatattccccaagactatttccggaaattcccaagaatattctatgcttggattgggtgacatagtgattccaggattgtttgttgctatgatttta

SEQ ID NO: 121 - DNA, 397 bp, Cyanidium caldarium
  Clone ID: LIB190-003-Q1-E1-A3
tccgaaggtccagggacgcgtcagcaaacgcgtaagcgacggcatttctctccggataccacttgtggtagttcgagctgccatcccttctggtgccgcttctacagttgttactgatcttgtgacgcgatcctttacaaggaaattgcgtccaatgtcctgtggagccagaagagaacgttgttgttatttcagccatcaaaactattagcacactccagaaagcattgcttcacacaaatactaaccagttaagaccttccatagtgctatttgtacctgaaattattgctcatgctaatgaccatgtttaagcacttcttcagatagctggtgaaaagaccgcatacagaatatcctccagaatagattcaacgatagatgatataataagcac

SEQ ID NO: 122 - DNA, 437 bp, Cyanidium caldarium
  Clone ID: LIB190-003-Q1-E1-A9
cggtcgtacttccggggccaccacgcgtccgaaaatggttgcaaagactgctctgagttgcctctttctctctttccttatcgctgccgcagttgcagccgacgtagtttcagaggagagatggggatatgctcagcaaacccaacaacagcaacagtgccaacaagtatgtaaacagtatgcatactatcagagtccagtctgcacttccgtaaccacacagagcccatactggacccaatgctcgaagactgtgcaaacctttgtcccaagccagtgcagtacttatacccaatctcctacatggacctattgcagcacctacaccaccactagcgtaccatctcaatgcagcaaggccgtgactacttatactcaaacctgctgtgcttatgcccaacaaacttcctatgcagtcagtaccgagcaatatgttc

SEQ ID NO: 123 - DNA, 344 bp, Cyanidium caldarium
  unsure at all n locations
  Clone ID: LIB190-003-Q1-E1-B1
cggacgcatgggtgtttgtcgttttgtcgattctagaaacgacacttttgcctttaaatagaatactcttctacgacaactttttcgtattcttgtttgcaaagctcttccttatattctttgtgcttggacaatggttgcaaagactgctctgagttgcctctttctctctttccttatcgctgccgcagttgcagccgacgtagtttcagaggagagatggggatatgctcagcanacccaacaacagcaacagtgccaacaagtatgtaaacagtatgcatactatcagagtccagtctgcacttccgttaacacacagagcccatactgggaccaatgct

SEQ ID NO: 124 - DNA, 289 bp, Cyanidium caldarium
  Clone ID: LIB190-003-Q1-E1-B10
ggggtgcaaccaaaggttgttgttaaaacattaatggcaacggtccggtccaaacccgaggaggacccatggaaacctttgaaccttataaaaggaaaaaccttttaaggaaaaattacggatggccaatttgaaatccaccgttgaaaagttgtcttaaaatttagaaagaaatgctttcccggttaaaaataaaaagaattctaagctaatagagtatttaaatgaaaaagacacaaataactactgatcgtttcgtacgtaatattcttcaaaacataaagggggg

SEQ ID NO: 125 - DNA, 312 bp, Cyanidium caldarium
  Clone ID: LIB190-003-Q1-E1-B12
cttcaacgtggctcaacttcgagatgatctcaacaaagctaatagagtatttaatgaagagacacaaataactactgatcgtttcgtacgtaatattcttcaagacgtggacgaacttgagtcagtctcagggttgcttgaagataaaacaaggacgcctaggaaaattgagaatactcaaaagtggttgaagaagttgtatcacgactttgatcgttttttggctttatatccagaatcctgaaaggaaagaccgaaagtcgaggggcttctcatggaagaagagggaatgcaataaaacattttgggtac

SEQ ID NO: 126 - DNA, 296 bp, Cyanidium caldarium
  Clone ID: LIB190-003-Q1-E1-B5
cgtccgcaaagaaatgacgcagtagatcagagagtaacacatgcaagtaagtacaacgaacgggtgagtgtataagtctgaatggagtctgtgattctgacgccacacatcaatgtaacaagtggtaatattgaacgccacaagcgatataagaggggatatccgacaggacgatagctacattgggacttagaaagagtctcatcagaatatgtcaaccctagtgaaaatggatcaagttcaaggagaatctgaaccatctgtaagcatttgggttcataaacaatgccatttgg

SEQ ID NO: 127 - DNA, 419 bp, Cyanidium caldarium
  Clone ID: LIB190-003-Q1-E1-B9
cggggccacccacgcgtccgcacacgcgtccggaaagaccgcaagtaaaaaagggactggagaatttgagagcttatcgtaagaaggtattggatatgtgtagcgcttttcaaaagaccacaactggaaatccagcaacttgtgagggataacttcaacgtggctcaacttcgagatgatctcaacaaagtaagtcatatgtgctgttgttgatcaaatttaaaagaattctaggctaatagagtatttaatgaagagacacaaataactactgatcgtttcgtacgtaatattcttcaagacgtggacgaacttgagtcagtctcagggttgcttgaagataaaacaaggacgcctaggaaaattgagaatactcaaaagtggttgaagaagttgtatcacgactttgaacgtttttt

SEQ ID NO: 128 - DNA, 251 bp, Cyanidium caldarium
  Clone ID: LIB190-003-Q1-E1-C1
gtccgaaccaagataaggtatcaaagtaaagatagaaggatatagagaagaacataggttaggcttagaagcagcatacttcagaggaaagctttaacgcattactgaaaatgaaacccgacccggagaagaaaacgttagaacttcagaaccgatcaaggttaaatgttcaagaaccagcttacaagagtcaaatctgggttgaattcctaaaccatacaaagggagtcctctcttagaaaaaagtcccg

SEQ ID NO: 129 - DNA, 393 bp, Cyanidium caldarium
  Clone ID: LIB190-003-Q1-E1-C12
cgagacgcgtgggaggcagagtcgaacatagctgaattaaaggaagaactttcgtcagttgatgagcagattcagtccaggaagaagcatctcgaagttcttgaaaatgaagcactctctgttatggagaactataagctctgcgaagaggagcagaaagtaaaggaagagaaactatcaaaggtcaaaagagagtacgagtcttataagatgcagactgcatcctctcgtaaagaagagtcccgccttgaaaaccaaatcgatgatgtaaagaagaagattcaagacatggactcgaagattacttactggactaaagaagaacattccctgaaagttgaggcagaagagcacatcgtggatttgcaaaacgcaggaattcctgtcactgat

SEQ ID NO: 130 - DNA, 372 bp, Cyanidium caldarium
  Clone ID: LIB190-003-Q1-E1-C2
atggcaaccacgtgttgaagagtggagttgcaacgttgacacaagacactcccaagaatcaaccggtagtggtgtttaatcagagcgagataccgcttggttttggtgtgactgctcgttcttctttggaagtgcaacaagcgaattcgacggatttgattgtgttgaatcaagcggatattggaagttatttgagagatgaagatcattttgtaggttgtgcgctataataacaacaactccaatagcaatgtctatccatatatacctttatatatataaatatatatatatttgtgtaaaaaaaaaaaaaaaaaaaaaaaaaaaaaaaaaaatataaaaaaaaaaaacaaatcataaatttgcaaaaca

SEQ ID NO: 131 - DNA, 398 bp, Cyanidium caldarium
  Clone ID: LIB190-003-Q1-E1-C3
ccacaagaaagcagtcgtcgacccctgtcaccagctcagagctataacagttttttgctttaacttatacacagaccagttccatccgaacgagtattttgccttacgaaacctacttcctccacttactgaatcgtcccactctcgatacgcaagtgtcccttctcggttcttcacgtattcaactttgggtggaaccacaactttcagcccaaaaccgtgggaacccgtcaatttcaaacccttgtcaatcaaacatgttctcaaaacgacccaatttctttccatccaacagatcagaatatcggctacggtattaacacctgcaaggtatagcaaatatttctcaatagtttggaaaaattccgaggaatacgacatctaaaataccagatgca

SEQ ID NO: 132 - DNA, 423 bp, Cyanidium caldarium
  Clone ID: LIB190-003-Q1-E1-C5
gatagtggaatgaaaaacggttgtccttgatgaaaaagtgtcaacttccggttctccctgaagacattgaatctcaaattctggaattattagagtatgtaaaggatgttgctgttgctagaatggtttgtaagcgatggaagagactcgtggatgaaaattcccaattgtggagacgacttcaaggctttacactaccaaaacgactaccaagtgaagcggaaaagtggtatagaaaggcagcggaatgtgggaatcgagaggcaatggtgcttcttgccttgctctattattatggatatcagagtcaggatgccacagttttgtctttgacgtttcttcgaaatagtgtcgcttgttagtgcaacgagcactagtgtcgttgttgaggtatttataaataaataaatttgtctttggtgg

SEQ ID NO: 133 - DNA, 420 bp, Cyanidium caldarium
  Clone ID: LIB190-003-Q1-E1-C6
gcaagcgtgaagcgtgagggtagttcatcatggttgagacagagcttcaagatggtgtttgtgcttctctttggactgttcgtctcttcctctacacatttatgttatcattctctgccacgatcattggcttggatggacgtaaagtatatcacatatggaatgacagcttattctatgatgggaagtatcattaacttttgtgcttaatctgcctcttctgttgtagaaggacgggatcatggaccgtgtaaatatgtcatggccttggcgtccaaaattttgattctagtctttttcttgtggctttttacatttgtagatgcgttgtatcctatgcttaccaagtcttggtttatcgaattgcgtatcaacgtgtttcaaataatgtggtggttggttggagcgtttgtggtatct

SEQ ID NO: 134 - DNA, 378 bp, Cyanidium caldarium
  Clone ID: LIB190-003-Q1-E1-C7
gatggtcaagaacggtaccgtgctatcacctctgcgtattatcgaggtgccgttggagcacttctcgtatacgatatctcgaagaaggaatcctttattggtgtagaaaaatggctaaaagagcttcgtgatcacgcggatagtaatatagttatcatgttggtaggaaacaagtcggacttgaagcatctaagagcggtgagcacggatgaaggaagggagtttgcggagaagcactccttgtcgtttatcgaaacttctgctttggatgctaccaacgttgaacaagcttttacccagttgctgactgaaatatatcgaattgtgcataagaaagctcttacaattgagaagaatagttcgttcaaaccggctctg

SEQ ID NO: 135 - DNA, 417 bp, Cyanidium caldarium
  Clone ID: LIB190-003-Q1-E1-C8
aagaaatccgaaaaagaagagaaaaaggtaagaaagaggaccgaatcagggtaagaggtagaggagcaagaagagaagagagaatgctgggtggagtagcgaaacaagagaagggaagtaaaaggtaagaaagaggaaaggtttacgagagaaggaagtagaaagaagagagtgtaaggcggcgtcataatagaaatccgaaaggagtagaagaaaagagagagaagaaagaaaagaagagaaaagccgtactgaagaccgacacaggtactcgaggagaaaggagacccaaattaaggtgagagaatggacgataaggaactaggcaaaaggatatggtatctgcggtagaacatatgaaagaagcagcaccgactgtttagcaaaaacacagcactctgcagaaaagagaaaatg

SEQ ID NO: 136 - DNA, 406 bp, Cyanidium caldarium
  Clone ID: LIB190-003-Q1-E1-D1
gatgtaacacccgaagagtttcttggcgatgttttgggtgatatcaattcacgtcgtggaaatgttttgaatgtcagtgaccgtagtaatcttaaagtcattcaagctcgagtaccactagcgagtatgtttcagtacgtttccactttgcgttcaatgtccaaaggcagagcttcgtacagcatgtttttagacgggtatgaggtagttcctcagcacattgaaaaggagttgttgagtaaaggaggagggtcttcgtgatgagaataaacattttattgtgaggttgtaaaaaaaaaaaattccctaaatatttacaattttaaaaaaaaatcaacaacatacacaaaagggggggccctctacaggtctaaagcttatataaaaaaaaaaggggcggcccccc

SEQ ID NO: 137 - DNA, 409 bp, Cyanidium caldarium
  Clone ID: LIB190-003-Q1-E1-D11
gtcagaactcaagcgttgcagcatttgcaaattctcaagtttactatcagagctcacctgttatgcaatcgtcagctggtgaggtatccacaaaagcaggttctgtatctgaaggaaaactgtattcgggaagtggttcttctttacataatgacaagtccgattcaaggatttccaacgatataggaaataacaccgtctcgaaccaacatggttccaagtcggcagtttccaatacttctgcacaagccaacaaaacggtgaaagttcatttggtattttgtccaagtgacgaagaaatttcaatggaggagttgcgagctcagttaccaagatatcaaagacagatgatatcgtcgtcgtcgtaattcgtatctatgctttaagttttcatctttttgctaacacg

SEQ ID NO: 138 - DNA, 326 bp, Cyanidium caldarium
  Clone ID: LIB190-003-Q1-E1-D12
gggatggaagctagacaaagtatactagagaacagttcaacagaagacaacgagtctttttctgcagaacaactcgtgaaacacaaggaaaaggaactgcaaacacttgtaaagataaaagaatacacccaagagatattaggacaactcaagttccgagtacaaacttttgaaaaatatgataccatattagctgatgccgtagaaacaatagcgcattggaaagaaatttctcgttgcagcgccaatatcttagcggataaagaatacgtaaaagtacctttagaagataaaaagcagtaaatttcctaaatatttacgatttt

SEQ ID NO: 139 - DNA, 423 bp, Cyanidium caldarium
  Clone ID: LIB190-003-Q1-E1-D2
cggacgcgtggggatacaccgtgactttggtttgttgataagccacgtaaattttgccggtgagagaacccaaacgacaaccagaagacaatacttgagtttgccactcgtttttgttatgatggttattcgataccgcggtggttcttggttcatgggtcacaggaaatacgataggtccctgggttgcaggatcgaacaactggatgacgattccgagtccttcaaacccaacctcgttaccatatgcgggaccataagttggtggatgtttggtataccaaaaagcgaaatggtctactcgcggctgaaactccttggttcctatccagtagaagaagctggcgttgaagttggtggtggtgagtggtgcgacgtggtacatagttccaaaggagggtgctttcaagctggtcagctgta

SEQ ID NO: 140 - DNA, 387 bp, Cyanidium caldarium
  Clone ID: LIB190-003-Q1-E1-D4
gatcatgaatgtatttttgcgttcgttgattcgtgcactggcctcccttgtgtttacttactacagaatttcgccaaatatgggggttgaacaagctttgcccgtggcttgccctatagtaagcgaagttcttagttgttggcaagttttctgtaggagacctgactggagtctgggactgacgactctgactgaaactccaaataatttgtcaagtttcagtcgtctcatgtgtttacttttctttgttttgcgtgagatcgcagtttctgcgggagtctgacccggtgggagagacttcagcttctctttacaggaatactttgctaacttgttgttatttgttttgcttgaaagtaaatataaattgcatttgtttggaattgc

SEQ ID NO: 141 - DNA, 442 bp, Cyanidium caldarium
  Clone ID: LIB190-003-Q1-E1-D5
cagttactttagaactgggtggtaaatctcccaatatattctttgcagatattgcaaatgagaatgacgaattctttgaaaaggctgtggagggctgtgtcatgtttgttctgaatcaaggagaagtttgtacttgtccatcgagagctcttgttcacgagtccatttacgacaagtttatcgaaaaggtgattcaaagacttggtaaaataaagcaaggagatccactcaatttggagactatggtgggagctcaagtatctactgaacagatggataagattcttcactatgtggaattgggaaagaaggaaggtgctcagtgtattgttggaggaagtggaaagaaagctattggaggtgatttagaaggtggctattacattgaaccgacgatattcaagggagataacaagatgagaatattccaagaagaaatatt

SEQ ID NO: 142 - DNA, 171 bp, Cyanidium caldarium
  Clone ID: LIB190-003-Q1-E1-D7
cacacgcgtccgataaggcgctggaatatcttttgaaacaagcttccacgccaaaggttgcttcttcttcataagaaagttatatacttttctccatgtcttgatatgagtcccgttctcttctttttatctatatataaataaatgtgttttcggaatcaagtttcaagg

SEQ ID NO: 143 - DNA, 334 bp, Cyanidium caldarium
  unsure at all n locations
  Clone ID: LIB190-003-Q1-E1-D9
cccacgcgtccgcccacgcgtccgccttacctctccaagaaagtgttgcacggctgtcgaaagaacgtgctgtgaagtgagagaacgtacgagaaagccaagtgaggaaaagaaggcaagtanagggcggcccgagaaaggagagggcgtaagacgtgatacagagtaggaagaaaagagaagagagctagaaaggaggtaaaagaagagtaaaaggactagaagaggtacggaattcacgaagaangagcgtgaaggaaggaggaatcccaagtaatcgaggaagaaaaagcttcggtgaaagcgtgaacggattttgtacacactgcccgtc

SEQ ID NO: 144 - DNA, 253 bp, Cyanidium caldarium
  Clone ID: LIB190-003-Q1-E1-E1
cccacgcgtccgcccacgcgtccgcccacgcgtccgcggacgcgtgggttcctgcagaatatcgacctcggatacacgtgagactgctatctaatattgaggaaatcttactaggaggaagacgtaacctgttttatctcccccatgaagcgctgtctgaaagagcaacgctggcaaaagatatatttgcctgtatagcttatagcttacacgctttgttgccttgggtgatgtttttctacctttgttgttt

SEQ ID NO: 145 - DNA, 407 bp, Cyanidium caldarium
  Clone ID: LIB190-003-Q1-E1-E11
atcttttctggggttctgctctaggtccaactccttgggtggttgcttcagaaatttatccaacctatttacgtagtcacggaatgttgctatctgatgttacaaactttacaggcaactttattactacatacgcattcaaacatatgaccaatgcaatgacgaatacaggtacctttgttggtttctatggaggtcttactattctcggttggatgtatctcatgttctttatgccagagaccaaagacaagactctggaagaattgaatgaagtatttgaaaggccgacgatggacatttttagagaaaatgtggtccgagtgaaagaaacttgcaatgatttgattcacatgcgttggagaaatatttgggtcttatccaaatagacgtgtttttcccgtttg

SEQ ID NO: 146 - DNA, 439 bp, Cyanidium caldarium
  Clone ID: LIB190-003-Q1-E1-E3
aattgtaccgaaaaaaacacttgtgacaacctgactcgggtttactgacagatattctgtctggtggtttttgtattgctcatcaagtcttgaacagagctggtttgtatattttgatgacaaacgggacgagtttcttggttttttgaagtaactttttcgtctccaaaactgtagcagtcatttgcgctagagtgtaatgtttgttagaaagtccatagaaagctgacctgccaatgccattgtttatatgggaagagtcgcgtattttttgtattgtcgttcacaacaaggttctcttttgatgttttttcggttcttcggagttagtgctgtgttgaaaactagcaatacttttgtagtgaggcaagtttcttgtcattttgtctagagacaagttcgtttgtcaactcatttgtcttttgcgtccctggagttg

SEQ ID NO: 147 - DNA, 419 bp, Cyanidium caldarium
  Clone ID: LIB190-003-Q1-E1-E4
cacacgcgtccgcccacgcgtccgcccacgcgtccgaaaatgagcaaataggaatatatggatttacaaggacaagccacttgtgaaaaatatgccaaaaaaggcatcttgtggacaacgttggtcgccttgatcgttggactagtcacagacgattacctgcgaatggttcaagtatttatattgggagtagttttggtagctatggtaagctgtctctatgtgtttattggacacttctatttccaatcctatatacttgtagggcgtacttttcccctggccatggtatacaagacatccacttgtgtttgtccacgccgcaaccaaaaacaacaataataacaaccattcttaaccaaaaaaaagcaaatttcaagacaaattagtcaagagacaaattcatttgtcaactcaat

SEQ ID NO: 148 - DNA, 438 bp, Cyanidium caldarium
  Clone ID: LIB190-003-Q1-E1-E5
cccacgcgtccgcccacgcgtccgaaagctcttccttatattctttgtgcttggacaatggttgcaaagactgctctgagttgcctctttctctctttccttatcgctgccgcagttgcagccgacgtagtttcagaggagagatggggatatgctcagcaaacccaacaacagcaacagtgccaacaagtatgtaaacagtatgcatactatcagagtccagtctgcacttccgtaaccacacagagcccatactggacccaatgctcgaagactgtgcaaacctttgtcccaagccagtgcagtacttatacccaatctcctacatggacctattgcagcacctacaccaccactagcgtaccatctcaatgcagcaaggccgtgactacttatactcaaacctgctgtgcttatgcccaacaaacttcctatgca

SEQ ID NO: 149 - DNA, 450 bp, Cyanidium caldarium
  Clone ID: LIB190-003-Q1-E1-E6
cacacgcgtccggttttgttgaattttcgaccggaatagagtcggttgtttggtgcactttgtcattctcttcattggagtagtagtgttgttggttgagataaagacattgcaacatatttgcttttacgttaaaaaaaaaaaaaaaaaaaaaaaaaaaaaaaaaaaaaaaaaaaaaaaaaaaaaaaaaaaaaaaaaaaaaaaaaaaaaaaaaaaaaaaaaaaaaaaaaaaaaaaaaaaaaaaaaaaaaaaagggggggcaccccaaaaggttcaaactttacttacccttgaatcaaacttcaaaactcctcaaaagtgtccccaaaattcattccaagggccgcattttaaaaacttctagagtggaaaaaccctggtgtaacgaaattaaaacccattgaaaaaaatcccctttctacaagcggggttaatcccaaaaaggccccc

SEQ ID NO: 150 - DNA, 434 bp, Cyanidium caldarium
  Clone ID: LIB190-003-Q1-E1-E7
cccacgcgtccggagtagcgaaacaagagaagggaagtaaaaggtaagaaagaggaaaggtttacgagagaaggaagtagaaagaagagagtgtaaggcggcgtcataatagaaatccgaaaggagtagaaaaaaagagagagaagaaagaaaagaagagaaaagccgtactgaagaccgacacaggtactcgaggagaaaggagacccaaattaaggtgagagaatggacgataaggaactaggcaaaaggatatggtatctgcggtagaacatatgaaagaagcagcaccgactgtttagcaaaaacacagcactctgcagaaaagagaaaatgtaaagtatagagtgtgcggcctgccaaatagtagagaagaaatcgatgaaagtgaaagcgagtaaaagatgaggtatagagaatggcggtcctaacag

SEQ ID NO: 151 - DNA, 448 bp, Cyanidium caldarium
  Clone ID: LIB190-003-Q1-E1-E8
cttatgtagtgtttgggtttctagcacatctcatgtctgcttctcagtggcacagatctggtacgaagtgggtgctagaatcacctctcgatcagcaagccaagggttatcagaagaaagatagcaggagtagagatagtcaatatgatgatgacgagtattcaagacaacgagataagtcatcaagtaaaaaagagtcgtccttccatcctcccatacgaaatacgaagcaaaactattatgatgtgttacaagtggatcccaattccagtatggaggatattaaggcttctttttatcgcttagtattgaagtatcatcccgatcgttttcctggagatgagtcttgtgcagagaaaatgaaagaaatattggaagcttattcagtacttgggaatcctttgaaacgtgccatgtacgattatagtcgaaaacagcaatgttctgg

SEQ ID NO: 152 - DNA, 263 bp, Cyanidium caldarium
  Clone ID: LIB190-003-Q1-E1-F10
ggtagcagttgtacattcagcatcatcaaatgccaaagggaggaaagaaagattcttcaaagaaagaagccacaagtaaacctgcagcagcagatgctacaaagacgacagaaaagtctggtccggaagccaagttgaagggaactggtgcaaagaaacaataaaaagttgactatgcatgttcctgttatgttttgtgagttctgtttgatagtttccagctattcttttggtagtgaataaagagaaaattttttatattt

SEQ ID NO: 153 - DNA, 448 bp, Cyanidium caldarium
  Clone ID: LIB190-003-Q1-E1-F2
cggacgcatgggcggacgcgtggggcccgaccaatgttttttgcttcgcggtctagtactttagctagtagatatttaacactttcttgtttaaacggtgctattaaaaggagctttgtcatagaggcaacctgcaaagaaacgccagatacttccaagaaagagtttcccgccccaagccacttttctccgcaagcaaagcttttgaaagaagttcgtaaaaagaaggagttttggtcgaaccctgataatgtgatcgagcgaacccccgaagataaagagcgaataaagcaaagaagtgaaagggtggtgaaaatgttgggctgtgaagttaatgaaaaggacaactttgaagtaaaggatcgtgtgaccgtaggagaacttttagcgtccttggggcacaaaatacccggttatccgagaccaaaaatgggtcctactgtgtttg

SEQ ID NO: 154 - DNA, 410 bp, Cyanidium caldarium
  Clone ID: LIB190-003-Q1-E1-F3
gatgcccaacttatatcacgcagccaactatcatacccaagtactgcagtatgtcggtctctgaagagtatgtacagcaacagcaatgtgtaaagtatgtggctcaacaagttattgcacccaaacaatgtgtcaagtactataccgagcagaagattcaacaaaagtattgctctcgctatgttactgaagaataagtacaaagcaagcagtgcatcaagtatgtatctcttcagaagatcaagtacgagtcatgctctgcccaatatgaagttcaaaagatcaaacagcaccaatgtactatgacagtctctgaacaatacatacagccggatacttgctacacctatgttcctgaacaacaattggtgcctcagacttgttacaagtattattctgtacccaagttt

SEQ ID NO: 155 - DNA, 442 bp, Cyanidium caldarium
  Clone ID: LIB190-003-Q1-E1-F6
gcttttgttggagactgcagttgcatcctgttgttccatacaggttacacttacactggaaaggccatggttactacaaaaagaattccaccatatcaaacgtgccaacaaccaccacaacaaaaattgctagacgtgttcaaactcacatagggaaccacagtttcaacctattttataccaaggcttgttttactaacttgtcgcgtaccaatcatactactaaaagtagcgaaagcaaggagaaccagccactagagtctctaccctattatccttatttggatgagcgtggatttctcacttttcaagatgattggggaaaagtctctgtgtacgctatatatgatgcaaaatatcgtttacagtacatcggtatttcaagagatacgcgtacttccttgttacttcatctcattcggatgcctgcgttgtgttatta

SEQ ID NO: 156 - DNA, 427 bp, Cyanidium caldarium
  Clone ID: LIB190-003-Q1-E1-F8
ctctatatatatgtgtatgtgtgtgtgtgtgtgtaatcatccactattgcagattgcactagcgagtggtgtatcttctcttctatcttcgatgacggtttatcctttggaggttattcgaagtagaattcaagtccaagatgcacaaaccagaaatagttatcgtggcattgtcgattgtatttcgaaaatgttgcgacaggaaggagcgttggcattttacaagggaatgggtacgagtctccttcgaacagttcctagtggaatcatctccttatcgagttatgaaatgggacttcgattggttcatcgagtcaatctctattggaatgcactttaagatccctcttccatagcttccttgtcttctctttccggtttcaaatagaacatttccatttcttgggattccacaatctgtacacca

SEQ ID NO: 157 - DNA, 419 bp, Cyanidium caldarium
  Clone ID: LIB190-003-Q1-E1-G10
ggtccagcacgcgtccgcacagacttccggtggtttcaacgaacatggtgaggactgttatcgttcgaagagactatcttcactgggttctcaagtacagacgatttgaaaagagacacaggaatattccagcatattgctctccttgcattcgcgtgagagaaggatacgtggttaccattggagaatgtcggccgttatccaggacagtacgctttaatgtgattagaattgatcgagcagcacctgcagcagaagctggaaagaaaatctatagttccatataaacttgttgtttcactctattactcatatcatgaaaactgtgcacacttgggaagcctcaaaaatgatatgaagtgagacgtacttgggttgacgagtgtaccacaaagttgttgtaactagatactgctcgg

SEQ ID NO: 158 - DNA, 408 bp, Cyanidium caldarium
  Clone ID: LIB190-003-Q1-E1-G12
cccacgcgtccggtttattattggttgtggtaaggagcaaaatatgcaaaaggaacaaacatcgtcgtcctccacaccacaaccaaccgtcagcaaacgaacttttcatctagagaaagaacaagagttgcgtttcgaagtatccaccgaaaacaaagtgcaccttactcttctatccggtacagccgaagtctttggcatagagctgccaaaagggagacacgtggaattccaagataccaaactggcagtatttacttggcacgggtgtgaattggaacttgaaggtatcacagacttggaatatgtcgccagtgaaacacctatgcacctttatctcaaagcccactatctgctggactgtatgcgcttgcaagctaaacaacaaggaacgagaggacccaaagt

SEQ ID NO: 159 - DNA, 429 bp, Cyanidium caldarium
  Clone ID: LIB190-003-Q1-E1-G4
gtccgtttctcgtctaaacaagctagtttttcaagtgctcttgatagtgctcttccattcttcttatgcccaacattggaaagagtcactggaacaatggatacctaaagaaatggaaagatcctttcaaggaatattctataatattgacccacctggaggtattcctggttcggtaacagctgcagattctcactaccagcctgactattactataactggataagagatgccgctataactatggatgtcgttgtcactctctatgaaagagcaactgaacctgctcaagtaaaaaagttggaggatattcttaaaagttatgtgcactacaactatattatccaaagaactcccaatccaacaggaaatttgacgacgggtggcttaagagctgctcattatcttctcaatggttctgcatttac

SEQ ID NO: 160 - DNA, 416 bp, Cyanidium caldarium
  Clone ID: LIB190-003-Q1-E1-G6
ggttgtttgaccattggacaatccattatctttgtgcacacacgcgcaagtgccaacgaattgaccaagagacttcgagaggaaggccatactgtatctttgttacacggaggagatatgtcacctgaagaacgggatcgcgtgattgacgagtttcgacgtggaactacgaaagtattggtaacgaccaatgtattggcacggggagtagatgtattacaagttaccgtagttgtcaattatgatttgccactagatgtgaacaatcaacctgatccagagacttacttacatcgagtaggaagaactggaagatttggtagaaagggtcttgctatcaattttgtgtatgatcgatacagtttgaagcagttgcaggacattgaaaaatacttgggaaactgtcatatagagaa

SEQ ID NO: 161 - DNA, 453 bp, Cyanidium caldarium
  Clone ID: LIB190-003-Q1-E1-G7
cccacgcgtccgccttataacagtaccaagggaatagatggctatctttggtacatcgtggcagccggaagctttgtgatatggtggtcattccttgccttgtttatattcaaaaacagatcgctattaaactatttgaacaatttgtacaagaagaagaggaaagatatcaactcaataaagtagtatggcacttgtatcattcctctaaaaaaaaaaaaaaaaaaaaaaaaaaaaaaaaaaaaaaaaaaaaaaaaaaaaaaaaaaaaaaaaaaaaaaaaaaaaaaaaaaaaaaaaaaaaaaaaaaaaaaaaaaaaaaaaaaaaaaaaaaaagggggggccccccaaaaggttcaaacctaacttacccttgaatgcaatttaaaaccccttcaaaagtgcccccaaatttcatttcaggggccttcttttaaaaacttccgaaggggaaaa

SEQ ID NO: 162 - DNA, 444 bp, Cyanidium caldarium
  Clone ID: LIB190-003-Q1-E1-G8
cgtttagttgcggagccatcttttgcaaagggtttgactgatggctttatgaaactagcaaaagacgaaggattcgttggtttgtacaagggtcttggaccgattctattcaagcaagttccatatacaatggccaagttttcagtttttgaaacagcgcaagaagttatttacagaacgttgagaaacgttggctatcctcgtgaaagcatgtctgagggtatgcagttagtggtgagtcttaactctggcattattgctggacttgctgctgcaattgtatcacaaccagcagataccgtactttccaaaatcaatcaagtaaagaccgagggttctactgcaaaggcaatcgttacgattatgaaacaactcggtgttcgaaggctgttcttaggaacaggacctcgttgtttgatggttggatggttgactgcaggtcaa

SEQ ID NO: 163 - DNA, 269 bp, Cyanidium caldarium
  Clone ID: LIB190-003-Q1-E1-H10
gggtcgaggacgcgtccggtaaataaagcaagcaaaggcatgagagaagtataatagcagaagcatgcttgaagaaaaagaaagagatttcagaaagggaagaaaagtcagctatagagaacaaggtgaaggagaactcaacaaagaagggaacaaccgaacgattcaaaaaaaaactttggggggaaaaggttaaagtggggttaaaaaacgtatcaagcaccacgaattgaacccccaaggtcggttcaacaaaacccaaggaaaaa

SEQ ID NO: 164 - DNA, 243 bp, Cyanidium caldarium
  Clone ID: LIB190-003-Q1-E1-H12
acgagtcacggattagataggtttagggatgatagagaatcatgaagtagaggatgtggggtaagagattaaagaccactgcatgaggataatgaatctaactgagttaggaaaataaacttaagctactttggctggggaagtaaagcctaagaaagagtaaattacgcaatcaaaagcatgagagaagtataatagcagaagcatgcttgaacaaaacatctagccaagaaatatggagtg

SEQ ID NO: 165 - DNA, 483 bp, Cyanidium caldarium
  Clone ID: LIB190-003-Q1-E1-H2
gcctgcggtaccagtccgtaaattccgggacccgtccgcccacgcatccgattgaaaatcatggtagacactaagcttaaggacggtgctagtgctgctctttggacttgccgcctatttctctatacagttgtgttagcattttcagcaacaataattgtacttgatggaaggaaggcagataacatatggaacgatgccctatattatcatggaaaagtggtgaacttttgtgcatattcggcttcgtctgtttttgaaggtggcgaccatggcgcatgtaaatatgtgatggctttggcttctatcagcttgattttagttttctttctttggttggcctcctttgtcgacgcattgtatccaattcttacaaagttctggtttgtggagcttggtatcaacatattccttactatgtggtggttggttggtgcaattgtggtgactgcaaagcgaccttctagtgttgttatggatgcg

SEQ ID NO: 166 - DNA, 434 bp, Cyanidium caldarium
  Clone ID: LIB190-003-Q1-E1-H3
tgtgaagactttttcatggcacccaaggaacgtagtaaaccaaagagtcgctcttctaaagccggccttcagtttccagttggacgtgtaagtagattcttaaagaatggaaactatgcagaaagagttggagctggagcacccgtgtatttagctgcagttttggaatatttgactgcggaagtgttggaactggcaggcaatgcagctcgtgataacaagaaaacccgtatagttccacgtcatattcagttggcagttcgtaacgacgaagaacttaacaagctgttgggcggtgtgactattgcttcaggtggcgttcttcccaacgtccatcccaatctgctaccaaagaagaaggcaaaggaagacatgcagtaaagtttgccttgagctggtgtttttgaacaccacctttacaagaaacttgtcac

SEQ ID NO: 167 - DNA, 450 bp, Cyanidium caldarium
  Clone ID: LIB190-003-Q1-E1-H6
cacgcgtccgcggacgcgtgggggaagcaaagaaccttcgagtattagtgggaatgactccttccatgagatttccacgggtaagtgggaagcaaatattggatctattggatagcgaccgatacaagttgagtcgtcagtttcaaattgtacatatggttggaaagaaacatacggaacagttggttgtaagcaagaaacggaataatgtacataagcttgtattggcacgcaaaacttatggaagtattcaatggaaagtggatatttcgaggctcgtggtagaacgcctcaaatatttaggtactgtggttttgaatagtacctttccagtttccttggtagacaacaatattcattctgaacaaggaatagaaagcaacaagcaaacggagatacaattgacggaaacatttactaccaaaaatattctttctgcagccattagta

SEQ ID NO: 168 - DNA, 337 bp, Cyanidium caldarium
  Clone ID: LIB190-003-Q1-E1-H7
acgtaattcaacaacgtatcttgaactcaagtttcgaagctagttaactatctgcttggggattttctgtacagattgttttggaggtttcttcctcttcacttgcataattccatttagaatctgcgatatgtattttacgaaggatagtatcgagattctttcgataactgccatgaccatcaaaagttggacagatggttgatacgttgatattttcaactctgggacagtcaatttttctcattcctgcaatatgtttcacttgagagaaagttcgatgtaggagacccaaaatccagtcattttcgcaataaacatttaccaatcgtcctgc

SEQ ID NO: 169 - DNA, 383 bp, Cyanidium caldarium
  Clone ID: LIB190-003-Q1-E1-H9
cgtcgagcccgcatccggtctaaacgaatcaatcattcagtaacagctaatctcataataaccaagatacttacaaagacccccaacatgtacatatttgtgggatactgattcttgtcaaaaatgagggcatataacgctcccatcgttgagaataatctaacccacataagccaaggattcttcccaaaagccttgaagaaaaaaaaattaactgaaagggttgatcacttttacagcactcagaagaggggtttagccgttgggttaatgtccggtgaccgtgtggatataactatcacttgattcgtctactatttaaaatatcttcaaccgtgtcacctatttccacatcaacgtctaccttttcaaactttcttaac

SEQ ID NO: 170 - DNA, 405 bp, Cyanidium caldarium
  Clone ID: LIB190-004-Q1-E1-A10
cccacgcgtccgacagaaaaatggtcgtgaggatccgtcttgcctgtataggcagaagaaaccatcctatgtataagattgtcgttgcagacagtcattggcctagagacggaaaacatgtagaagcaatcggcttatatagccccattgcagcaacaaaagaagagcttgaaaataatacaaaacgagttttgttggatgtagaaagagcaaaatattggatagctactggtgcacaaccaacaaaaacggtcttttatttatttgctttggcaggaatcttgccaatgcctccaaatccagttttatggcagcaaaaagcaatcgcaagatatgaaggtataggagttgatgaacttgggaaaccgattagcaaggaagctttagaagaacaacttgagaaag

SEQ ID NO: 171 - DNA, 407 bp, Cyanidium caldarium
  Clone ID: LIB190-004-Q1-E1-A12
aggatttaagattcaaggatgagaaagaagttattggtaagcgtggttcgagcacaaaacattcctattccacccaactcggatggtgcttatgtagttatttcttctccgcaacaagacttttttagaaccgaaagtgtaaagggagatggggcggaagtagtatggaatgctatggagtttcccattcaagtgagtccggatacgagcaacttgactgcttttgtatatgtagaccaaaatgtttccaaagaaaacgctggaagagctgaagtacctttaaaccaagtttttggggatggttctcaactgggttggtatccagttttatttaaacaaaaggatggttcttggcgttctcaaggagacctttacttagaaataagatatacaggtgatgactattc

SEQ ID NO: 172 - DNA, 292 bp, Cyanidium caldarium
  unsure at all n locations
  Clone ID: LIB190-004-Q1-E1-A2
acgcatccgcatacgcgtccgcggacgcgtgggcgccaggtttcatatttgtcgtttgttgancanatcacgcaagatcgaaaatcagattgtgtcgtttactgttcatggaagagtaaaaggactctactctatctataagaagatgaagcgtggtagaaagctaaaagaaatttatgatttaattgcgttacgtataattattcaaccacgaaatccattaaaagaaatacaagcatgttacgatgtacgagcattagtggaacagcgttggtttcctgtggggtacaaa

SEQ ID NO: 173 - DNA, 310 bp, Cyanidium caldarium
  Clone ID: LIB190-004-Q1-E1-A4
cggggacacccacgcatccgggaaaagcgccatatcgggaaaacagcagttgatggccggcttgaaccgtctaggaggggatgaatacacacccaaaagcaagttagaaagaatattacaagtcaagcgaaagagaaatttctcctctgctggaatagatgaaaagaaagagtcggttgacctccctagcgtctcaagtgtacaagcttgtgaccttcaactacccagaaaaattcgcgctaatcgaaaaggcatgtttcctgtgaagaaaacaatattatcacaaggaaaaaagataagagctgatttg

SEQ ID NO: 174 - DNA, 323 bp, Cyanidium caldarium
  Clone ID: LIB190-004-Q1-E1-A6
aagagcacattgaagagtttaaatcggtgaagaagtttaaagttttcaacacagataacatttggctgaacttacgtgcagtcaagaaacttgtgaaagaaggaaagatggatctggatattattgcaaataccaagtcggttggagatcagaaagtaattcagttggagacagcagttggttctgctattcgatactttgaaaacgcccgaggtgtaaatgttcctcgctcacgttttctcccggtgaaatccacatctgacttacttttggttcaaagtagtctttacaccttgaaatctggaactcttattcctaatcca

SEQ ID NO: 175 - DNA, 401 bp, Cyanidium caldarium
  Clone ID: LIB190-004-Q1-E1-B10
catttgttctgtaaaagggactcgaagcgacgccatgtccaaggtctttcgaacagcacgaagagtatatcaagttggaaatgaactttctctaggtagcttgttggagagaaagagcgttcagaatatatattctcgtcgttactttgctacggaaactgaacaacaacactcccatgagcacaaaaagaggttgacgtggagggactttagggaaggcagatgcaacttggacgagcttgctaatgacaatcgtcatattggagtgtatattgttctgtccatctatgttgttgttggtgtcactctaaaaaaggtgtttggtggaaagaaaaagagtgaagacgcagtttcctcagtggattaaggcgagatggtacctgcacaataaggcattactt

SEQ ID NO: 176 - DNA, 398 bp, Cyanidium caldarium
  Clone ID: LIB190-004-Q1-E1-B11
gggttggtgagccgctactcgctttgagtctattcacgtcctcgtattcgtcttggtttccttatactgtcctaagaaaaaatcattctattaaacaatatcgtggagtcgcttcagaaacgtcgtaaaataaagacagaaggcatggcaggggtgtcacgtgcaaagcttcgtcttatgacagacttgaggttgatgaagcaagagcctccagagggttgtagcgctagtcctttgagtgacgacaacttgttcgtttggggtgccactatttttggcccccctgatactgcctgggaaggaggtatctacactttgcgacgaacttttagtgaagagtatcctgataaaccaccgagggtccgttttacttgtgatatgttccatccgaacgtcta

SEQ ID NO: 177 - DNA, 405 bp, Cyanidium caldarium
  Clone ID: LIB190-004-Q1-E1-B12
cggacgcgtgggggaggattcgaggagagagacagacagatggccaacgctggtcaagatggccttgtgcaagtcaacaaacatagaaaagtaaagagattgcaagaagataatattttgaatagagcactatcacaaccaggagatgtatttctgtgcttttgcaacatccagttgttggtgaatgcagaaagagctattataggaaatattacttgtccagaaagtatcgaattgtgtcgtctattagctggacatatagcggtttggttcgatgaacatttggatgactttcgtttggaagctatcttgggagcactattgtgtacttgttattgtgagtggaagcgttttgaaggagaattgggggtacaagaatggaatgaattggagaagatatcttcc

SEQ ID NO: 178 - DNA, 353 bp, Cyanidium caldarium
  Clone ID: LIB190-004-Q1-E1-B2
ttcggcgtcgacccacgcgacacgtgctgaggatgaagcaagttgggaaaagttgtggagaggaaaacgcgaggtcattggatatactttggaagcagctttacagaaaacttgtattgtggaaaaccagttgagggagtggaaaaagaaactcgatagtctagcagacaattattcgttgggtacgagagcctatgatgcgagaatgtggtcattggacctcatcgcaactattatgagtgtctgttttgcagtttttggaatgttttcacaattctttggttattatgtccaattgcccattttacatatgggaaatgcgagtcagtattacttttaaggcgttatgggaa

SEQ ID NO: 179 - DNA, 459 bp, Cyanidium caldarium
  Clone ID: LIB190-004-Q1-E1-B3
ggtccgacattcacgggttcttgtctttttttttattttattttttttttttttttttttttttttttttttttttttttttcccccccaaaatccaaaaatccgatggaaaacttgctggaaaatggggtccttaaccacctaacttggggcccctgttgggaaaatttaaagccccccaaaactttacgggctttccaatcagaaaaatgaacggttttattgaggcccctaatgacttggatgctgccaaaaaatttgaaagtaactattggagaggaaaattgggcgcccaagggaaaactactggggggtattattaaaaaacttgtccccaaaaaaatttccgccggattgttggattttggggaggaaaaaaaaaaaaaaacggcggaaccacataaacaaaaacacaaaaaaaaacaaaaaaaagaaaaaaaaaagggggggccccccaaa

SEQ ID NO: 180 - DNA, 430 bp, Cyanidium caldarium
  Clone ID: LIB190-004-Q1-E1-B5
gatagcagtatggcacccaaaggatccaaaagtgtacccgttgctggaaaaaagcccattggtaaagcagaaaagaaaaaagccaaaaagaagcgtgcagaatcttacagtatttatatttacaaagtgttgaaacaagtccatcctgacactggtatatcttccaaagcaatgagcatcatgaattcctttgtcaatgatatatttgaaaggattgcttccgagtctagcaagctggcagcatactcaaagacaaaaactcttacttcgagagaaattcaaactgctgtacgccttttgttacctggagagttggccaagcacgcagtttcggaaggaaccaaggcagttacaaagtatacttcttcctgaattcaaggttgataaatagactagcgtacaagtgtttttgtgtgttttgaaaagtttg

SEQ ID NO: 181 - DNA, 413 bp, Cyanidium caldarium
  Clone ID: LIB190-004-Q1-E1-B8
gatgattttatgtccttgtggtagtagtaatgtctaggcttggctaattgtcgccagtaacttgtcttcgtcgttcttcttattattatgagtgaaaaggtggagaatggtactaataacgagttgttagaaaaaccgagggttgtgatatttggtgctggaggcgtaggtggttatttggctgccagacttgcagagtgtggacgtagctttgttcacgtcatcgccagaggttctcacttgaaagctattcaggaaaataacaattgcatcgttttaaaaagtatcgatggtgactgcacttcccaattggatagcatcggggaggacgcacaaagtgtgttgaacactgcgacaactcccgtaaatgccgtgatatttacttgcaaaatggaccagttggctgctgcagc

SEQ ID NO: 182 - DNA, 407 bp, Cyanidium caldarium
  Clone ID: LIB190-004-Q1-E1-B9
gagggggggggtttcactcgtgtgttttctcttgacaaaactcgaagactatttatttcttgttatgttttagaggtttttctagagtgtgtttttggagttgttgtacttccagtcttggtggttggtgaatggctctagtgacaaagagaagagggtttgtcactttcccgccattctccacagcttcaactatcaacttgtatacgcgcacaactacacagctatattaatacagagttgtggtgtaataggcggcaatttgagtggttgaaaaggattggtgaaaagtagaagactagtgaaggtgttagagaaaaggtccttgtatatttgtaccctctactaactatttcctcttgaagagatttcaagtttggtgtattcgacaagagttgcaagtgtta

SEQ ID NO: 183 - DNA, 403 bp, Cyanidium caldarium
  Clone ID: LIB190-004-Q1-E1-C11
cgccaatcgtgcctgcactagaagatgaatggcatggtcgtcatctgctagttctgaaatatcgcttgtttgaaccagaagttccttaagaccaagcatttctgatgtgaatgattggatattctttccaagcagcgtttcttcctggccaatactggtattagatgctgaaccgctttgggcactcgaagaatatgttttttttgatactattggtgataatatggagcttggaatgtttttcagagcccttgttccatatacataaggttttccttcttgtcgtacttcaggaaagtggtacttgagattcttgctatggaagcgttccatccaaaagagtgctgccggatccattgcaaaagaggaggatgcttcgagctcttctgcccatgctctaatc

SEQ ID NO: 184 - DNA, 408 bp, Cyanidium caldarium
  Clone ID: LIB190-004-Q1-E1-C12
caggaaacaaccaggaaaccgctgttttcatcgcaagaaaaggttttattctcccaccaacgactggcgactttgggttaggtgccaagtcgacgaacaaaagttgggcctaactccagaactgggaagactagtaaatagttttgcagcagctccagaccctaaacttaggattcaacagttgctttacttggcacagactttagagcccctgcctttccagtacaagacaaacgagaataaggttcccggttgtctctctactgttcacgttattggcgtctgtgaagacgataaaatttttttcaagggagattctgacgcacagttaaccaagggtctacttgctttgcttatcaagggtttgaacggttacacagttgaggagattgaaagagttagtccgaa

SEQ ID NO: 185 - DNA, 296 bp, Cyanidium caldarium
  Clone ID: LIB190-004-Q1-E1-C4
gggccagccacgcgtacgcacacgcgtccggttgaaaaatacttgcggaggtttttccgatcccaattccgctcaaattgcggtttatttgggtcaattgcatatgatcgcggaatgcatgtggcatagtacagaaactttgcattccggagtctatagagaaactgaacaattaactttgagtaactggtttgcaaaagaagaagaagaataaagttgatatcgtcgtttcaaaaaaaaaaaaaaaagaaaaaaaaaaagaaaaaaaaaaaaaaagaaaaaaagataaagaaaaa

SEQ ID NO: 186 - DNA, 363 bp, Cyanidium caldarium
  Clone ID: LIB190-004-Q1-E1-C6
ggtccgtaatcacggggccacgcacgcgtccggtacgagaaagccaagtgaggaaaagaaggcaagtagaaggcggcccgagaaaggagagggcgtaagacgtgatacagagtaggaagaaaagagaagagagctagaaaggaggtaaaagaagagtaaaaggactagaagaggtacggaattcacgaggaaggagcgtgaaggaaggaggaatcccaagtaatcgaggaagaaaaagcttcggtgaaagcgtgaacggattttgtacacactgcccgtcaagttctggaagtgtgctaagaataagcacgggaagtaaaagagagtaagaaaaaaaaaaaaaaaaggcggccgccccaaaag

SEQ ID NO: 187 - DNA, 423 bp, Cyanidium caldarium
  Clone ID: LIB190-004-Q1-E1-C7
aattgataaggttgtgctttattggagcgagtgtttgtgttgtgactcagctatagagacatgtatgtaaaagtaaaacgacacaaaaaaatttattttattttctgtgaacccaacgattctatcgcagtcatcaagacagaagtatccaagttatcggatattccagtggaaaatatcgaactatggaagaagataccaaccgcccctgtaaatacacaagagcaaccacaatactccaagacaagtcgaggaggttttcaaaggctggaaaagaccgtacaagaagaaggaatagttaacggagaaacgctctatttgacgtttggaaccgacgactatacagatattgaagtgacgccgtttgaacactaatcacacagtctctgtggaaaccctgctatggaaaaaggcacatctgag

SEQ ID NO: 188 - DNA, 222 bp, Cyanidium caldarium
  Clone ID: LIB190-004-Q1-E1-C8
ggggccagcacgcgtccgcaaacacgtccgattccgtcttgtggtgtcaaggatgacgcttgcacgttggtaccgcgccttttccactgcgtccagttctgtaagaaagctaccgccaggtttcgacaaggcagcttcccttccgaaagaacaccatgctcatgaagcagaaaagtggaaaagactttcccttgcctttggtttggtcgttgcaggtgttgc

SEQ ID NO: 189 - DNA, 405 bp, Cyanidium caldarium
  Clone ID: LIB190-004-Q1-E1-C9
cccacgcgtccgcccacgcgtccgtaacaatattcctgcgaggccaagtggacatagaacagaaataccagcacgtccatcttcatcgacaacaaccacaggaggaggaacagcagcttatcatttacctcactcaccttattatggcaatcctttctattcagggccattctcttctgccgttcatcatagcaactttggtccgttttccgtttcggcgtttggtccttttccttcgttatttggactgcagtttacttatcctcctcctccttctcatgtatcctcccaaaacggtgcttctgtagctgaaggtatgacagaagaacaagccaatcaagcctttgtttctcgtttgttgcttgtaatgggtttacttattatattatgtcttttatttgtgtg

SEQ ID NO: 190 - DNA, 406 bp, Cyanidium caldarium
  Clone ID: LIB190-004-Q1-E1-D10
cccacgcgtccgcggatgagcagcaacagccaaaccccaaaacgaaacaccaaccagacggaaaaagtcgtcttgttgtggtttttactggacgcttgtacacacttgacaacagaacttgcctttgtataccactccttaaccacaaccgtggaacgagccacacactggactgccttgttgtggaaggaatatgccaaagctgatacgagatggggtcgttttcacgattgtactgtggcgatggaagtagttacttctctcctttggggtcctctagctctcttgtgtgcctatggtgtgtatagaagagcagcttggagacatttttggcaacttgttctttgtgtcggtgaactttacggtggttggatgacgtttggacccgattggttgacaagttttg

SEQ ID NO: 191 - DNA, 404 bp, Cyanidium caldarium
  Clone ID: LIB190-004-Q1-E1-D11
gaattctctcatgtcgtggttgcgtcgtggttattcaagattgtggtttcgtagtttatgtagcaacaatcggaatacttttcgcgaggaatgggaacatttaccgcaacaagaacaagaatggaaaagagcaggcaatacggaaaaacaaggttcattgggagaaagaaaaccctaccctttgaagcctcttgacttggacaccagatggagtcttggaagcttgaaccgtgccatactcataggatatgtgggtaatgatccggtgaaaagagaaatttcttcgagcacggtcgcttggatgtttcccttcagtaccgcttacaagaaaagaacgggagaccaagaaacaatcaccgattggcacaatgtgacagtttatgcctctccttctgcaaagtttt

SEQ ID NO: 192 - DNA, 401 bp, Cyanidium caldarium
  Clone ID: LIB190-004-Q1-E1-D12
tgctaggctgtgcaaatgtctcgttattccatcggcgtcgacctcgtgtttctattacaacgcagtgatgaagatgcacaagactggatgcgacatcgattgtacgatccatcgacaggtgttctttatcatcccgtctattttccacctccggcacatcgcattccttatttgcaacgacgaatggacgatcaggaagcggtgatgcaaaagcgattgcaacaatatcgacaaaatactttgccgctcgttcattttttccaagtgagttgatgtcgcttcgttgttgttgttttttatacacagttatcgaaacaaaggacaaattggtgtggatagataccagtaataagagaccgacggagcaagtatttgaagaaatctgtcaacatgtggaaaga

SEQ ID NO: 193 - DNA, 349 bp, Cyanidium caldarium
  unsure at all n locations
  Clone ID: LIB190-004-Q1-E1-D3
cgtccggcaacaaagagcatgtcgtccggtctagacaagtcgttggaggacattatcaacgaacaaagaaagaacaagacaccgggaaaaaggaatgctggaaaaggtanaaagtttgctgccgcttctaaaaagctttctgtcaagggaaagattggaaagaagagaatgggaaataagatgaggatggatgtcgaccaagagacgacaagtggaaagcgttggaagcacgataagtttcaagctagtggtggtggtagtgctccaaagagtcaagtaactcgtgtccaagtcaccaacttggcactccgtgtgaccaacaaggatatcaacgacctccttttctgaa

SEQ ID NO: 194 - DNA, 85 bp, Cyanidium caldarium
  Clone ID: LIB190-004-Q1-E1-D4
catccgtactcattggcttttaaagcgctgttgcctgtatcttaacaggatgcattggcgaatcagaaaatagtttgccgaaaaa

SEQ ID NO: 195 - DNA, 259 bp, Cyanidium caldarium
  Clone ID: LIB190-004-Q1-E1-D5
ccacgcgaccgacatacctccgttggcgcttaggccgtggcgtgggttgacatggggtactggtcaagcaggagtccttgggacacacgctatgtccacaagttcatacgtttgtagcgtgtgagtacttgcaatgacctctctagtacgagggacgcgacatgacttaccagcccacaaaccaacatatgaccaactggtggtcgaactatctcaactcaaggcggatttattcgcagaaagacacaagccgaaaggt

SEQ ID NO: 196 - DNA, 79 bp, Cyanidium caldarium
  Clone ID: LIB190-004-Q1-E1-D6
taacagttcccaatagcatcatggaaatgattggcacggtaaccttttcagaaagttgaatgacaaggatcaaaaatat

SEQ ID NO: 197 - DNA, 356 bp, Cyanidium caldarium
  Clone ID: LIB190-004-Q1-E1-D7
agaacacaacaaaattttacaacttgcgtttcatagttttggaactaacttgacatgcaacaaagtaaccttcgagtagtccaatcttctttggtggcaagctttgtcctcattctaagtataatctgtgccattcatgcagtaacagccgatgaaataacaagtttcgagagaggataccaaacagttgcaccaactcagacgcagcaatgtcaaaagatttgtgtcaccgccacacaaactcaagttcaaagttgtatttatactcagacacaggctctgttcatgtctcaatgtgtcacagcattgccaactacctgctataaatacgtaacaaaatataagcaggtgtgctg

SEQ ID NO: 198 - DNA, 242 bp, Cyanidium caldarium
  Clone ID: LIB190-004-Q1-E1-E10
acgcgtacgaaaacagatagagaataaagaactgaagagaaaagccgtactgaacaccgacacaggtactcgaggagaaatgagactcacgttaatgtgagagattggatgataaggatctatgcagaaggatatggtatctgcggtatatcatatgacacatgcagcaccgactgtttatcacatacatagcactctgcatataagataaaatggtcagtagagattgtgcggcctgccac

SEQ ID NO: 199 - DNA, 401 bp, Cyanidium caldarium
  Clone ID: LIB190-004-Q1-E1-E11
attggtttttgggcatttgtagaagcgttggctgttgcataaagagctatgtcggaagagtcagacaacgaaggcgtggagatcaagttagagactgcacctcatgatcctcgcttccaaactactaatcaagccaagcactgttggtcgagatacatcgagtatcacgcttgtgtgaaacaaaaaggtgaagaggacagcgagtgtcaaaagtttaagcgatggtacaagtcactgtgtcctatggaatgggttcgtaagtgtttttccaacagcttatacttaagtgatttctaggtagaaaactgggacgaacagcgtgccaacggtacctttcctggtcccgtgtagttgtactgttccacgtgggcccttttggagtttaactgacctgttgtccg

SEQ ID NO: 200 - DNA, 405 bp, Cyanidium caldarium
  Clone ID: LIB190-004-Q1-E1-E12
cccacgcgtccgcccagtaatgaggagtggagtaaacagaaaaggaagtaaaaggagggaatgaagggaagttatggcaaaaacacgtgccagcagcagcggtaaaacgtgtgtagcaagcgtagagcagaagaactgggtgtaaaggtcgagtagtagagtaagtgtaaaagggaaaggaaaggagagaaagaggaaagggatgaaatgcagagatctctagagaaaggcaagaaagaaaagaaaggaagacacagtaaatgaggcgagaaagcataggaagtgaaacggattaggaacccgtgtagtctatgcagtaaaagaaagaggcaaatacgggaaagcagtaaaagaagaaagagaaaggaaaaaactgagtatcaggaagaaaagagggagtagatg

SEQ ID NO: 201 - DNA, 407 bp, Cyanidium caldarium
  Clone ID: LIB190-004-Q1-E1-E9
agaaaagagagagaagaaagaaaagaagagaaaagccgtactgaagaccgacacaggtactcgaggagaaaggagacccaaattaaggtgagagaatggacgataaggaactaggcaaaaggatatggtatctgcggtagaacatatgaaagaagcagcaccgactgtttagcaaaaacacagcactctgcagaaaagagaaaatgtaaagtatagagtgtgcggcctgccaaatagtagagaagaaatcgatgaaagtgaaagcgagtaaaagatgaggtatagagaatggcggtcctaacggtaaggatccaaaggtagcgaagtaaatagacgtttgaaaggcgtccagtatgaaaggagaaacgagtgtagcactgtctagtcgtccaactcagcgaaacagc

SEQ ID NO: 202 - DNA, 347 bp, Cyanidium caldarium
  Clone ID: LIB190-004-Q1-E1-F1
gggtccacgcacgcgtccgggcaattgaaatttcgacatgttttgacgctccggagggaacatttcgtcattttgatagaggttgtatgccgaaagttcgttttgcaggaatgatgcagtatgatggtgaaagtaaaatcccgaaacactatattgtctcacctcctcatatcgaaaggacccttggagaatatttggtgcataatggatgtcgacgtctctccataagtgagactcagaaatttggtcatgttacctatttcttcaacggaaatagagcaaacaaatttgatgaggaactcgaactttatgtggaagttccaagcagcagagaaagagaaaatact

SEQ ID NO: 203 - DNA, 401 bp, Cyanidium caldarium
  Clone ID: LIB190-004-Q1-E1-F10
ggaatctttcgattttggtgaagtaatgatacatcaacttatacatactatcgagtttgtattgggagcagttagtaacacggcaagttatcttcgtttatgggcgcttagtttggcgcattctgagttgagcttggtctttttagaaaaggttttgtataatacgatttatttacaacatccgatagccattatgatcggtttcttactttgggcatttttgactgtaggcgtgttgtgtcttatggagtccctttctgcctttttacatgccttgcgtttgcactgggtagagtttcaaaacaagttttacaacttgcaaggagaaggaattaagtttactccaatatccttttctacataaactagtctctgttttggaataaatggttgcaatagac

SEQ ID NO: 204 - DNA, 360 bp, Cyanidium caldarium
  Clone ID: LIB190-004-Q1-E1-F11
tgtcccaccaacaacaacaacaagaagatgatgggacaacctcaaggctagcgtctttgaaaagttatgatgggatatttaccaacgtatcgataacctggagtggttgaatagtgagcaaaagacaatgtggaaagactggttggtagaattgaaaacgagatggaacgacgctttggaacactatgtgagtcgcatggtggaagagttgaaacaacaacaccgattccgtacagtaacggaggaagaaagacaggcgttgattcgtccaattgtacaagcatttgaagatgcttggaagagaattcgcaagatgatggtagaagatggttgaatagaatgaggagggagacgagagcc

SEQ ID NO: 205 - DNA, 310 bp, Cyanidium caldarium
  Clone ID: LIB190-004-Q1-E1-F2
ccaacgcatccgcggacgcgtgggcggacgcgtgggcggacgcgtggggctactagtgaacagattgtttcaaattcgggaggagtccatacacttgtctttgttcacacaaagagtccattgttttttgcggacacttgaagacagttggaattggataaaagatacgaggggaccagatacatagtaaagcctttccgaggagaattttgtctgcaatactatgaaacaggtcatgactgacacaatacactttctacaaacagtagagcagagatgcatacaatgggacaaactgacatgaaagctt

SEQ ID NO: 206 - DNA, 431 bp, Cyanidium caldarium
  unsure at all n locations
  Clone ID: LIB190-004-Q1-E1-F4
cgtacgcatacgcatccgagtgagtatgtcctcaacaatattgctgttcacgtgcctatcactcagatcatcaacttcagttattgacgcaggcatgtgcattgatggccgtgagtagatatgctcttattgtggtcgaatctgcaactgctttacatcgtacagactagacctgaagaggagaacttgcagctatgcaataacatatggcgaggtttcttcgagcacttcaaaagctagcagatgaatttggtgttgctgttgttataacgaaccaactagttgcacacgtagatggtggtgcaatgtttgctgtcgatcctaagaaacctattggcggaaatattattgcacatgcctctcaaacgaggttatatttgagaaaaggaagagcanagaatcgcatatgtaaaatatatgattcgccctgt

SEQ ID NO: 207 - DNA, 396 bp, Cyanidium caldarium
  Clone ID: LIB190-004-Q1-E1-F6
cacacgcgtccgctttgtgcttggacaatggttgcaaagactgctctgagttgcctctttctctctttccttatcgctgccgcagttgcagccgacgtagtttcagaggagagatggggatatgctcagcaaacccaacaacagcaacagtgccaacaagtatgtaaacagtatgcatactatcagagtccagtctgcacttccgtaaccacacagagcccatactggacccaatgctcgaagactgtgcaaacctttgtcccaagccagtgcagtacttatacccaatctcctacatggacctattgcagcacctaaaccaccactagcgtaccatctcaatgcagcaagggcgtgactacctatactcaaacctgctgtgcttatgcccaacaa

SEQ ID NO: 208 - DNA, 274 bp, Cyanidium caldarium
  Clone ID: LIB190-004-Q1-E1-F7
ccacgcgtccgcacacgcgtcagcccacgcgtccgcgaagttacaattctcggggcggctcattttcaaataatggacgttatggctacgggaatcatagcaataatttcggaaggagcggatagcttctaataaaaattagtatctagttattcaaaaaaaaaaaaagaaaaaaaaaaaaaaaaaaaaataaaaaaaaaaaaaaaaaataaaaaaaaagtaaaaaaagaggacaaaaaaacaacaaaaattcaacataaaaagtcaaggggat

SEQ ID NO: 209 - DNA, 402 bp, Cyanidium caldarium
  Clone ID: LIB190-004-Q1-E1-G11
cgacttagtggttaggatgcctggttttcacccaggagacccgggatcaagccccggcagcggaattgcttgtactttttgaacaaacacttgtatctagatacgagcagtattccgagaagcttgttctgtctcacgtttcaagcttgctttttggctttctcttatgggccttggtgagaaagagttgactgaaggggttgatcacttttacagcactcgaagaggggtttagccgttgggttgatttccggtgaccgtgtgatataactaccacttgattcttcgagtattgaaactatgaaaaccgaaacgaatgtttcctcacgaacttctacgtgatcttgctttctcaactcatcgcctgcatttaaaagcactccttgtaaattcctctggaac

SEQ ID NO: 210 - DNA, 241 bp, Cyanidium caldarium
  Clone ID: LIB190-004-Q1-E1-G12
cccacgcgtccgaaaaaaaaaaaaaaaaaaaaaaaaaaaaaaaaaaaaaaaaaaaaaaaataaaagggcggcagcacaaataggttaaacatttagattcacctgcaggcgacgtcataactcttctaatctgtcaactaaggttcagttccatggtcgtcgttttataacgtgcttactggtaataccctggcggttgccatcttaagcgccttgcttcaaaacaccctttcgcctcgtg

SEQ ID NO: 211 - DNA, 422 bp, Cyanidium caldarium
  Clone ID: LIB190-004-Q1-E1-G2
gaacaaactgcctaagcatagttaacttaatatcagaaatacaaacgaactgccttagttgtgatagaatttcgccaaggagaaggatcaaaacaacccaaaccacctagctgaagtatctcctggaaacagagcttccaatacatgcaggaggacggccttagcgcaagcagtcacagacctcgctcgtacccagtaaactgcgaatgccagactctagagatagagcacagtccttactctccatatcgcacacacaactagaaccttttctcattcgcatggaagttttgctctggcacgtgacgacttgtgcagtccagcacgaatttgaagctctggtttcatccatgctttttttgggatagaatggataactagaacctttactcattcgcattaaaccttcagatgtcacgttg

SEQ ID NO: 212 - DNA, 343 bp, Cyanidium caldarium
  Clone ID: LIB190-004-Q1-E1-G3
cggtccacgcacgcatccgcagacgcgtgggcttcaatgcgcccattgccgaactgtttcatgctttggaaatagtttttggttcttctgttattcgagataatttggatgcgactggaaactctgctgtgtctatgttattattatcttctgcaatgtctgctttggtttctcaagctggtttaggttctagtccagcattttcacttcccaaatatgagatactatcaccagttgtggaacttccgctatatcttttattgggtcttttagccggtttggcctctttgggtttgaaatattctttgcagttgggaagtaacttttttcaaggcaaattgtc

SEQ ID NO: 213 - DNA, 182 bp, Cyanidium caldarium
  Clone ID: LIB190-004-Q1-E1-G5
acgctacggtcacgtgaccgcatgaatcgtgttgcaaatcgattgtcgctctgaaaaccattagtaagatcgcacaggaacagtcactggctgtacatcgtttacgatccgtgctagtatgagcgtttcccaggattgtaacgagagcattcccaaggactgaggcgactacaatcgaaaac

SEQ ID NO: 214 - DNA, 315 bp, Cyanidium caldarium
  Clone ID: LIB190-004-Q1-E1-G8
ccacgcatccgaattttttttttttgggggaaattttcatttgtttattgcaaaactggacaatcatcaaagctgtcgttacttgcttccaccaagttcttttgctctaattgtggcagcagtgacagcttgaatgactgcagtgcgaaagttgtgcttttccagagtagaagttccgtgaatagttgtgccaccccggagatccagtggagtgggaagttttgccggatgttcggtgcgacgaggagcgacgtttgctgcacccaaaactgtctgagtggctagagacaatggaacatccccaaggtaagccac

SEQ ID NO: 215 - DNA, 406 bp, Cyanidium caldarium
  Clone ID: LIB190-004-Q1-E1-H11
cccacgcgtccgggttttcaggggaaaagcaaacaagaatggcagtggattggagcagtcgtccttgcacttggcagaggttatgtattttggttgtgcttttttgtattgtgttccaactggtagacagtacccaacaaaagcttgtcaagattgagaaactggatcgtactattgacttgagcaaaagttacgtaacagaaaaggtggtgataaagctgaacactgcaaagtgggacgcattcgagctccttgttccttttcaacagtatgaagaaagtcttgcacatattcatgtggaagattcatccagtcgtgcattgcaagtaaaggagcaaccagaacgggatgtattgtatcgcaaactggtcgtccttccaaacgcttctacctcggtcagtgacac

SEQ ID NO: 216 - DNA, 386 bp, Cyanidium caldarium
  unsure at all n locations
  Clone ID: LIB190-004-Q1-E1-H12
gggccaaccaagcgtccgaagaacttggttgtactttagcacagttggcaattgcgtggtgtgcatcgaatcccaaggtttcgactgttattactggagctaccaagttggaacaattggaagagaattttcgagctatacaatttgttccaaagttaactgcaaagaaaatgaaactgatcgatgaaataactggaacgaagcctgactacaatgcggaaatgaaaatggcacgtcgcattcgaggcttggaacgatgagtccacacaagaagaaaaagagggttgggaaaagacancgatcgatgggtgtaacacaactagttattcatttattcagtaaagtatcgatactgctgtnaccgaaaacaacaacaactccctaaa

SEQ ID NO: 217 - DNA, 319 bp, Cyanidium caldarium
  Clone ID: LIB190-004-Q1-E1-H2
gggccaggacgcgtccggaaggaaaaacggacaaggaccacgacgttggcaactttgtttcaccaaacaacgtcgcagaaataagaaaagaatttcttcgtaaagcaaaaagagttcatccagacaaacaaagacataatgaacgtgccaatgaggagttttgtcttttgaaagaggattatgaacgtctcgtggaggcaacccaaagcaaccacacaacgagtagaaacatacttgtggaacacattcccttggaaaagtggaagagaacaacgacattgcaagaaatggacaataacaactacgcggacaatcatca

SEQ ID NO: 218 - DNA, 253 bp, Cyanidium caldarium
  Clone ID: LIB190-004-Q1-E1-H5
cgtccgcacacgcgaccgaaaggtacttctcatagagccgttctagtaacaaacttgagtccagaaaccaaggaagatagtctggaagattttttttcgttttgcggaaagattacaaatatcaaagtccgagaggcgcaacccccaagtgaagaacaagaaggtcaacagatacccccctcaaaggaagcaatagttgtcttcgaatccagatctgctcagcaagttgctctgttactgaataatgcggtgc

SEQ ID NO: 219 - DNA, 357 bp, Cyanidium caldarium
  Clone ID: LIB190-004-Q1-E1-H7
gtccaggacgcgtccgcccacgcatccgcccacgcgtccggactgcaaggacaaagcttctccaaagaaaatcgcagagtatacaattcgtacgttacagcgtactgtgccagctgccgtacctggcattgtcttgttaccaggtggacagtcagaagaagaagcttccgtgaatctcaacgccatgaatcaagtggagatgatcaagccttggaaactttccttttcttacggacgtgctttgcagtcatcatgtcagaaagcgtggcaaggaaaggcagataatgtccgagcggcacaagaagcctttttagctcgtgcaaaagcaaatagtgaggctactttggggtaatatgc

SEQ ID NO: 220 - DNA, 118 bp, Cyanidium caldarium
  Clone ID: LIB190-004-Q1-E1-H9
tgatgcctggctttcacacaggagaccggggatttagccccggcaccggcatggccagacctttgtgaacacgcagctgtgtccagatgcgggcagtatccgcacccacctgttctgt

SEQ ID NO: 221 - DNA, 413 bp, Cyanidium caldarium
  Clone ID: LIB190-005-Q1-E1-A1
ggtgtttgcatcgttagatgaagcttgtagagcttgtcgagagaaacaaaatgagtatttgggatggaaaaagatacgtcttactccggtcatatgagaaatgagcaacgacggccaagaggagcaacttggtcgtggtggtgcttctctgcttccaagtgccaaaagcttacttgtacgcgaagaaaaagaacaaacagacaaacttggactctttccgacgttggttttcttggcacttacaccagaaactagtcaacaattggcagaggtcattgggagtcagttgaaaggagatacttggacactttcttttcccgtagtggactataaccagacgttgctaccatcaagtaggaacaatgataagtatatagactcgtctacgtttcattcagatactccaagtgcgt

SEQ ID NO: 222 - DNA, 388 bp, Cyanidium caldarium
  Clone ID: LIB190-005-Q1-E1-A11
aaggggagaatatccgttgcatgtgtttgtgtgtgtgtgtatggtcattaaagccaaactctgaatgtgtttttgttaacactggaataagaaacagctttagaaacttatgggaaaaggttcagccacgagaggtcgttacaagtacgagttgtggcctgcgaacaacaagtttttttgtggaggaaagataattaccggtcccgactataaaaatacttttgcgacactgttgttggtcattatccccttgggactgtattttggtataactatttcctatctgactacgcattggagagcaggaggctatactttcttagcacttaccatattccttgcttgtgtgtctataataactttattgttaactgcaacagacgatcct

SEQ ID NO: 223 - DNA, 468 bp, Cyanidium caldarium
  Clone ID: LIB190-005-Q1-E1-A2
gtaaaatggcgccaatgttttcctttgtgatactttacaagtcatcgacgcacttttcttgttgtttttcaaagcaaagacaactgtggtttgcacctcgcagttatcggaggagtgttttagtcagtgaaaagactgcctcgaagagatgtgtggcttgcgtagatatgccagtccaaaagtcttccgaaaaggatacgcggcaagctgcaaaagcaacggaccattcctatgctagtttggaagccaaggtgcttatcgataacgaaaaggacttttatcacactgttatctcccttgagtggtaagatagaccaggtctttttgaaggacttgacaagttggtccagaaacagctgggttaacagtatgacgagtcttggcgaaaaacagagaaacaactagcactagatacttttttcgtcacagatagcggttccaaaattttagaagaagattttgaaaaga

SEQ ID NO: 224 - DNA, 360 bp, Cyanidium caldarium
  Clone ID: LIB190-005-Q1-E1-A8
cccacgcgtccgcccacgcgtccgcccacgcgtccggactaatcgtgtgaagctcgacagcgtctttacacatacacacacacacacactaacacgtgcaaggtttctggcgggaaagtacttgcgacaactagagtctttactacaaagggaaatgtgagagcgttggtaaagttttagtagacttgtgccgctattgcgtatgatagccaacctgttgtgtcagttgtatgtatggctttagacgaaaccttgtgaagcgagagcttttctttatcggacaaggcaattgtaccgagaaaacgacttgtgacaacctgactcggattgactgacagatattcggtctggcgggttttg

SEQ ID NO: 225 - DNA, 356 bp, Cyanidium caldarium
  Clone ID: LIB190-005-Q1-E1-B12
cagacgcatgggcggacgcgtggggcggacgcgttgggcggacccctgggcaacaacaaggatcccggaatggttaaaatcttggcgggttaccgttgatattgaaagaaataccttttgatataattgagtttccactttatgaatatttgaagaaacgatggagtgcaaatagcaacaacaaggaacgattggagacttggaaaacggctacttgtggttgtattgctggtgcagttgctgcagctgtcacaactcctttggatgtttgccaaaacaaaagttatggtggtacaaggagaggcgaagaatagcagtggaattgcttctactttgataaagattgcgaaagaaga

SEQ ID NO: 226 - DNA, 407 bp, Cyanidium caldarium
  Clone ID: LIB190-005-Q1-E1-B3
gggatgcagttcgagggctatcgttacttgtagtcagtcttactgcaatacattccttcatgattggatggctgttgaagataaagaatactagcggacttaggttggtatttcgagaagaagatgaagacattggtgcggacaacatcatcgtgttcggaaggagacactgtattcatgaatattgcaaaatatcttccgttttattaaaaaacagagagtcgtttcttggccttgttactgttttggaaacaataggtgacaacgaacaattcactttgttggacacaactggaaaaagaagattgataatttgtacgtatggaggtgtgtctagtaagagaaattggccttgtcgcccagaccttgtgaagggaatcgttgctaaaatgtcacaactaactgga

SEQ ID NO: 227 - DNA, 445 bp, Cyanidium caldarium
  Clone ID: LIB190-005-Q1-E1-B6
tccggggccacccacgcgtccgcaagcgtgaaccgtgagggtagttcatcatggttgagacaaaacttcaagatggtgttagtgcttctctttggactgttcgtctcttcctctacacagttattttagcattctctgccactatcattggcttggatggacgtaaagcagacaacatatggaacgacagcttattctatgatgggaagtacattaacttttgtgcttattctgcctcttctgttgtagaaggaggggaccatggagcgtgtaaatatgtcatggcgttggcgtctataagtttgattctagtctttttcttgtggctttttacatttgtagatgcgttgtatcctattcttaccaagttttggtttattgaattgggtatcaacgtgtttcaaacaatgtggtggttggttggagcaattgttgtatctgcaaa

SEQ ID NO: 228 - DNA, 426 bp, Cyanidium caldarium
  Clone ID: LIB190-005-Q1-E1-B7
cccacgcgtccggttttgggaagacgaggaatggaacaactttctttccaagtcaacgagttattacagtcacgaagatatgatccagatatattaccagacttggaaagatatgtagaagcgcagtgtttagaaggagcatatgatggcgacgcgaatttagcttgtttaaaactttatcaattttatcctgaaaaaacaaacgtttctattgtctccaagatattattgaaagccttggcagcacttcctagttccgattttgtgagttgtttgtacttactttctgagaaaatccaacgagaggctcctatatccaccatcataagttgggcggatgctttagaaactggaaagtttgtagagttttggaacagtttacacaaccatgaagagttgttgaaaggcttgccaggaatagaagac

SEQ ID NO: 229 - DNA, 446 bp, Cyanidium caldarium
  Clone ID: LIB190-005-Q1-E1-B9
gtccaggcacgcgtccggactcactcattttctctttgttttgtcttttgtagctgttttcctcgtagctcatgcagttcccgttggagaagatgcattcagtttcagtcagacttttggaaatgcttctgcttcaggcaacgcctctgttattccagctacaaccaagatccccaagttagaagtaactagtagtgcctcatcaaaggacaatggaaaagcagctcaagtagactttgcagattactcaaagggatatccttcgcctagctatttttacgctccttcttacacatcctatgtggaatttcctcaatatccatcctatccatcatggccttcttttaatgagcagcctgcctttggtggcttcgatcccaatgcagagtttggagagtctgaaattttcgtgtgatggaaacaaattggattccctacactgagtt

SEQ ID NO: 230 - DNA, 390 bp, Cyanidium caldarium
  Clone ID: LIB190-005-Q1-E1-C1
tcttgccattcgacaatattcaccacctagtcatatataggttcgtcgtcccaccggtattcctcgtagtatgcttcaaagcgtggaagctccagttcgtggaactgggttgagaacccccggtggagagtttgttactttgaaacccaatcaagatgagtttagtcgcaggacagctgcattgcggagaatggtggaacagagacaaggtgcaggcagttccgactcggagacaggtaatgtcgatgacgcaagtaggttgccaactgtcaaagacagccatgacgacaatgaaaattatcttgtcaccggcaagcaagaatcgaagaaggacgaagaaacggaggtgataggaaatgaatttgttgagaataaatcctattatcaaga

SEQ ID NO: 231 - DNA, 468 bp, Cyanidium caldarium
  unsure at all n locations
  Clone ID: LIB190-005-Q1-E1-C2
gtattcattttgactcgctgaaacatttggccaacacgacatttcagaatagtagcaatctatttgaagaatactatcgtcaaaatacaagtgtttattatgaaagagagcctgaaatcggtgagcttgtgtttctagaagggaggtcgcttgtgaaggtagttccatttgctctacctgaaagtggcatggatcgagatacaattgcaaaacgtttagaggttttaaagagaaactccgtgcaggaatctagttctccacaaagaacagattcgcatacctatcctgaaaaagaatcctggcaaaaggagaaacatccggtttcggacagagagtcgaggatatctgaaaggtatgcacaagacgaagactcgccttcagctcccacacagttggnatgatggcaaccttgagttttcaattancttgtaatttcacagaaataataaatgagatacttttactctg

SEQ ID NO: 232 - DNA, 402 bp, Cyanidium caldarium
  Clone ID: LIB190-005-Q1-E1-C3
gtatttttgtttgttgaaaatttcattcatcgttgctcattcttgttgcagatatgacaggtcgtggtaaaggtggtaaaggtttaggaaaaggaggtgcaaagcgtcatcgcaaagtcttgcgagacaatatccaaggaataaccaaaccagctatccgtcgtttggcgagaagaggtggagtgaaacgaatctcaggacttatctatgaagaaacacgaaatgtccttcgtgttttcttggaaagtgttattcgtgatgcagttacttatacggagcatgctcgtcgcaagacggtaactgctatggatgtcgtatatgctctgaaacgtcaaggccgcaccctttacggatttggaggataaagcctgcttgaacaaagggtgtttctcaacacctttc

SEQ ID NO: 233 - DNA, 411 bp, Cyanidium caldarium
  Clone ID: LIB190-005-Q1-E1-C5
gccgttgttccagagatggcacaagattacctttgaagatacgattatttagagcaaggtgcgactctagaacctttgtaaacaacagagaggaggaggataatatccgttgccttttttcccatacgtaatcaacactgagtatcaaacaatctttttcttatggctctgcagttggacacgcaccttatgcggcagaaataacaactgcagctgattcaagtcagtggcttggctccacctgtttacgaaaagaaggcggaaggacttggaaccaccaacattgtacctgctgtaacagtttgtggctactgaactattttaaaggataagccaagcgaacttgtaactctgtagaacggtttgggccttgaagcgagataggattgcaacttgcaacggcaaggattg

SEQ ID NO: 234 - DNA, 420 bp, Cyanidium caldarium
  unsure at all n locations
  Clone ID: LIB190-005-Q1-E1-C6
cccacgcgtccggaagaaaatggctccaaaaggtgcaaagagtgttcctgttgcaggcaagaaaccaatcaccaaaagtgataaaaagtccaaaaagaagaggtcagagtcctatgctatctacatttacaaggtcttgaagcaagtgcatccggatactggcatatcctccaaggcgatgagcatcatgaactcctttgtgaacgatatatttgaacgtattgccagtgaagctagtaaacttgcagcttattccaagacgaagactttgacttctcgtgaaatacagactgctgtacgtctgttgctcnctggagaactcgccaagcatgaagtttcggaaggtacgaaagcagtaacaaagtacacttcttcgtaatacgtactttgaacatatggtgtttgtcaacacttttttgg

SEQ ID NO: 235 - DNA, 414 bp, Cyanidium caldarium
  Clone ID: LIB190-005-Q1-E1-C7
cccacgcgtccgcccacgcgtccgggaaaacgtcatgcagttgcgtattccttctgctgcagtcaaagcacagtacgtcgacccaacgcaagttgttgtggaccctgtaagacatacaacaagtcctcttgtcactggaggttctgttgtaggaatacgatgttgcgacggagtagttattgctgcggatactttagcttcttatggatcgatggctcgatttcaaaacttgtcgagacttgtaaaagttactgacaattgtttgttgggtggtggtggtgaaatttccgactttcaagaaattcaacgtcttttagaaaacctcatcacaaaggacttttgttttaacgatgagcatacacaaagcccgcgatcagttcatcaatatttaggaagagtactctatgcccagag

SEQ ID NO: 236 - DNA, 101 bp, Cyanidium caldarium
  Clone ID: LIB190-005-Q1-E1-C8
tttaacaataagttttgtaaggctaagggaaattggttttgtacaagctcccaacttggtaaaatttcccggtgtggaaccatccttggcttgttaaccaa

SEQ ID NO: 237 - DNA, 433 bp, Cyanidium caldarium
  unsure at all n locations
  Clone ID: LIB190-005-Q1-E1-C9
tccacccacccgtccgcagtcgtcaggaattcctagtcggtttggttgacatttggtagatatggcaactgcagtggaaggaaaacaagaaacagcaaaggacaccaagttgaagaaggcctttgacctcaagtcattcttgaaggacctggcagctggaggtgtagctggggcaatctccaagacggcggtcgcccctattgaaagagtgaagttgctacttcaagtgcagtattcaaatccgcaaatcccggaggagaaacgttataaaggcatcatcgactgttttacaagagttccaaaggaacaagggtttatctctttctggagagggaacatggcaaacgtcatccgttactttcctacgcaggcccttaactttgctttcaaggacaagtacaaggccatattcttgganggagttgacaagaat

SEQ ID NO: 238 - DNA, 416 bp, Cyanidium caldarium
  Clone ID: LIB190-005-Q1-E1-D1
cccacgcgtccgcgattgtattgaacctctgcttggagttgtattatctgatgaacagaaaagattcgttgtcgacaatgcttataatacgagcgtaagttctccagtatatgaggagccacatccccttgtgactcttcgaagtacagaaggtttgacacaagaacaaaagcagttgagaagaatattgaagaatcgctggagtgcaaaaatgtctcgtatgaaaagaaatgaacagattcgcaggttagagttcaaggccaacgagcaggagagagttatacgagaattgctagaagaaagagctagcttgaagaacgaaattgaactgctgaagagacaagtggagaagcaacaactcgatcctctctgcggttcaagtcagtaaatgagtataacgagcgacctgatatacg

SEQ ID NO: 239 - DNA, 428 bp, Cyanidium caldarium
  Clone ID: LIB190-005-Q1-E1-D10
caagctactgcgggagaacaagtacccatcagtttcaagcctgaccattatactttgagaggaaagtgcatcggtatcttttccaaacttgcctttgaaaatcgttccgtgttggtctatgccactagtcggtgatcatctcggttacggaaattatctgcagtttttgggttggtggtttcttgtggcgtgtgtgggtgacgttgttaccgacgactgtgtgagagactacttgtacttgcttcattctactagttgaaatatgacgagaggcaaccaacgtgaggtagatagacaacgagcacaaaagagtgcagagaagcacaagaaaaatgttcagaaagaaaaggagaatattgttttgaaaaaggaaagggacgccgaaataatgcgccaaaaacaagcagcagccatggcaaaacagcaac

SEQ ID NO: 240 - DNA, 439 bp, Cyanidium caldarium
  Clone ID: LIB190-005-Q1-E1-D12
cacacgcatccgttttaggattgaaggtcaaatatctctgacaagggctattggagattctcatttgaagaagtttttaataagcgaacctgaggtgacgaaaatagaaaggaaagactggacttgttacgaatggattatcttggcaacagatggtttatgggatgtgcttagtccggaagaagtatctcacataatgaagaagactgtttcgaaaggagatttggtaacaaaacgtctcgtgaacgaagcgatagagaaaggaagtaaagacaatatcacagcaattgccatatttttgaatcaactctgatattttctcaaggcattattgtttatatcagtgattgagcttttggaataagagtcaataatagcaatactaaagtcaccgtattaaaaaagtcttcaaagcttcatctaaaaaaaaaaagaaaaa

SEQ ID NO: 241 - DNA, 296 bp, Cyanidium caldarium
  Clone ID: LIB190-005-Q1-E1-D3
cgcgtccgctgtgcctgttgcatctgcaaatactgcacagatgcaagctattcagcaacaacaatatggaggttccggtggcaactggaattttggtgctgcatatcgtccaccagagacagactttaacatatccgtcggttatcagcagcatcgaacaactattcagatctcgatggtacctgatgagtcagctggctacttgggtcctggaggtttcacggctggtgttggaccaggcaacttgggtctttccttcaacatcaacatttagtaaactaggagcgttccatctt

SEQ ID NO: 242 - DNA, 455 bp, Cyanidium caldarium
  Clone ID: LIB190-005-Q1-E1-D8
aacaacaattaggcactggatgctttgggcagcattgttgtagttgccatacaagtgcaagggactggagatatatttttaacaagttgaaacagtttgtttttcattatgcatacagagaaacaagaggaagattccacaacccaagtcaagacttttgaagacaaaccaaccaagaagataagcaaaccgaaaaaggaaaaagttaccaaaagggagataaagagtcccaataaaagaaagcgtgcgtgaagttgtttcattttgaagacgttgtttagactagtcttcctatagagtctacgaagggttccattgcgtctcctcgacaaagacgcaggaaaacatctagcgtaaagccaaagaggtcgaaaggaagaagagcatccaaggcaaccaagtcttccaaaggaacagtgagtatccgtatgtgtttttttgaaaaatgagcgaca

SEQ ID NO: 243 - DNA, 403 bp, Cyanidium caldarium
  Clone ID: LIB190-005-Q1-E1-D9
gagtgataaggttgacataaacaacgctaatatcagagcttataccaagtttcccggattttatccaaagttggcttccctgattgtgaagaacggtccatataagagcgtcagtgatctctataatattaaaggattgacggaagaacaaaaggagcttatcaaaaagtatgaggatcgcttcgtagcactcgatccagctccagaatatgaagtggacaagtttaacaatggactatatcgttgaaacaagctagtcttttagcgtgagtttcaaggcgcatctttgacttgctctcactattgcgcaataataaagtttctcgataaaagcttgttggtttaaaaaaaaaaaaaaaaaaaaaagaagaaaaaaaaaaaaaaagaatgagaggagaagagg

SEQ ID NO: 244 - DNA, 416 bp, Cyanidium caldarium
  Clone ID: LIB190-005-Q1-E1-E1
cgtagtcatttggtatccattcagaaaggtgactacgtagtggtacgagtatatgaacctggagtacagcgtctttatgcacatccaatcgctcgatcatccaataaggaatttcggaaaatcgaggagagtaacgtaattcaacaacgtatcttgaactcaagtttcgaagctagttaactatctgcttggggattttctgtacagattgttttggaggtttcttcctcttcacttgcataattccatttagaatctgcgatatgtattttacgaaggatagtatcgagattctttcgatagctgccatgaccatcaaaagttggacagatggttgatacgttgatattttcaactctgggacagtcaatctttctcattcctgcaatatgtttcacttgagagaaagttcgatg

SEQ ID NO: 245 - DNA, 376 bp, Cyanidium caldarium
  Clone ID: LIB190-005-Q1-E1-E10
cccacgcgtccgcccaggcgtccgcccacgcgtccgccaagactgtgttcccagatgaaccatctacgggaatggatcctgttagaccactacgtgcatgggaaatgatcgatcctgctaaaacaggtcgagtgatggtattgactcatcactctatggaggaagcggatgtcatggctgaccgcattggtagaatgtcgatacggatgtttaggtgtcatggtccacctctacatttgctgaagaagtttggcacaggatatcgcctgttgagtttgtgtaaggaagccagatatgttcgcacattttgattctcgaaacatacgcgagacctttcagacagggatgaaccgtcaaccttcaagtataagtgtac

SEQ ID NO: 246 - DNA, 250 bp, Cyanidium caldarium
  Clone ID: LIB190-005-Q1-E1-E11
gcgtccgcctatcgtctgcgaagattgtgttcccagatgaacatctacgggaatgggtcctgttcgtcctctacgtgcgtgggacgtcatcgatcctgctgagacaggtctagtgatgatattgactcctcacgcaatggaggtagcgtatgtcatggatgaccacgctggtagaatgtcgagcgggaggtttaggtgtcttgggccacatctacattggctgaacaagtttggtctaggatatcgtctg

SEQ ID NO: 247 - DNA, 455 bp, Cyanidium caldarium
  Clone ID: LIB190-005-Q1-E1-E12
gtagccgtccgacattctagggtccaccgacccgtccggaacaatattcgctgtcggcgtcgaaggcagccaaacgagcaggaagcaacttgaaacatggggcgtatgcacagtaaaggtaagggaattgcccagtcggtaattccctataaacggaacccaccctcctgggtaaaaacgacaccgaacgaagttgtcgatatgatttgcaagttggctagaaaaggtttagttccttcgcaaattggcgttcatctacgtgactctcaaggtgttcctctcgtgaaacaagttactggcaataagatagttcgcatcttaaaggcgaatggattggctcctgagatacccgaagatctttactttttgattaaaaaggcagttgcagtgcgtaaacatttggaaagaaataggaaagactaagaatccaagtttcgtttgattctcatagagag

SEQ ID NO: 248 - DNA, 437 bp, Cyanidium caldarium
  Clone ID: LIB190-005-Q1-E1-E5
aattcgacggagacaacaggatttgttcccaatgttcctcttcgactgtatcgcggacatagaatggcaacagataaagtcagctaagaagatatactcttatgtaaaagaatcaaaaaccaaagaatatttggagctagacgattcgttgcagcagccagtggattcatcttgtagcaccaagtggctgtttattgcaaccccactgttggaagttgcttgtactgatgggcagcgaattgaaatgattcctttgaagaaagatataaaggaattgtttttctctactttaaagaagaactttgaggtcgaacgaagcgtcatgggagtgcagtgtagttgaaacggcagttgctgtgtttagcaagtattatgaacagtgcgtggaacagtactatctagcaggcaaagattatgagccacctggttattccaaa

SEQ ID NO: 249 - DNA, 440 bp, Cyanidium caldarium
  unsure at all n locations
  Clone ID: LIB190-005-Q1-E1-E6
cacacgcgtccgcggacgcgtgggcgagcagctgctcctcagagatggtatgaggaacaatgcacctcatactgctgggttccagtacagacctatgaaacttatcaatgttctcaagagaagaagaaggagtacagctatccttgtcaaacttatgagcaggtttcaactacttaccagtgtggtcagtacgagtcccaacaagtttactaccaatgccaaaagtataaggaggttactcagcaagaatgccagtacgtccaagagtcgtattgtgtcgagtatgaagaatgtcagcaggttacccaggaagtttctccttcagaaattgtctactacggtgaatcttcgtctagcagtagttactacgactagaacacttgtgaaatgcgcaaagtcgcaaagtanagtgttcttttttgaataaactgtgacttttt

SEQ ID NO: 250 - DNA, 427 bp, Cyanidium caldarium
  Clone ID: LIB190-005-Q1-E1-E7
gttagtcttttattggctcttttatgcgtaggttctgctctggctgctgaattggcacctggaattgcggaaaaatcggtagagagaggatatgaggaaccctgctgtaccgaatattgttattgggaagaaatatgtatcacacccacacccacacctacaccaacctactattactattattacgcaagaaatgcaaaacaggaaaatgtcgagagaagcgtagaaaagagtatctcttccgcagaaaaatctgatgcggttcgagggtatttccccacgtactactattatgagactcctacatattattactattatgagactccgacatattattactagtatgagactccgacatattattactattatgagactccatccccaaccccgacaccaacgccttattgtacctatacccaaa

SEQ ID NO: 251 - DNA, 423 bp, Cyanidium caldarium
  Clone ID: LIB190-005-Q1-E1-F10
gaaggaggaggatatcaagcgtgacacgggatgttcttgccaagaatgaaatagaaggaaaaaaaaagttgtttattattctagccaagaagaacaatggttattgttgtaccagaggtcaagtcatgatgggagattaggattttggttttctttttcttgtcgctgaagtcttctatacagtgttattttgagttttcgacaaggaggacaacgaagaactcccaatttgttgacaagtaatacgtgacagtcaacggcatagagagaaacactcttgggtgatttgctcgagtccacgatacctaatatcgttcctcttccgtcttgagaagtgagataggtgagatggtcaccttgtggatagaaccaagtagaaggatacattgcaggattgcatcggatacacgcgacacagctgga

SEQ ID NO: 252 - DNA, 268 bp, Cyanidium caldarium
  Clone ID: LIB190-005-Q1-E1-F11
cccacgcgtccgcccacgcgtccgcacacgcgtccgcccacgcgtccgcttgttgaataagttttggactctctcgcttgacgggtttcttctcttgttctttttcttcttctgcatagaagcaactaaatactttttgaagaaaagtctttttcttctgttgtttcttaaataaaataacactttcaactgaaaaaaaaaaaaaaaaagaaaaaaaaaaaaacaaaaatagaagaaaaaaaaaaaataaagagtcaacaacacaaaa

SEQ ID NO: 253 - DNA, 440 bp, Cyanidium caldarium
  Clone ID: LIB190-005-Q1-E1-F4
gaaatgcctaaactgtttgagataacggaagatgcctttttggaaccaaaagagccaacagctatagaaaaatttcaggctcggtttgaagaatttaaagaagttatcactgaatcagatacttatcaacgaacttcagagattgtggaatctgttgctcattactccaaaaggtttttacgctttactggcaatttggcttggattggtgcaacctcagctcttgtgttggtagttcctttggtatatgaaattgataaggagttgggtgcttctggaggcttggaaagtgctggttccactggggacgccgccggtagtacgactcagccttctgccaagtaataatagtttttacatggagcgaaacgaacaattggttatctgccagttggtttccaaaatatgtcaatttgtagtagttttcactgtattgttgt

SEQ ID NO: 254 - DNA, 454 bp, Cyanidium caldarium
  Clone ID: LIB190-005-Q1-E1-G1
cccacgcgtccggcatgtcggaggaagaggaagcagattttcgagggaattgtgactcggttgctattccaaagaccaccgtgaacaaagtggcgacagaagtacttgccaatgccggtgcgcatctttcgtccgatgccaaagaactattggttgggttttgttctgaattcgtgcaacttgttagttcccacgccaacgaattgtgtgaaaaggaaaacaaaaaggttatttctcccgaagacattttacagtcgttggaagaactggggtttggagattattgccaagaagtgaaacaagtgtatgaagaattcttggaaattgaaaacgtaagttaggaatataacgtggtggtggtggtgcgtccttccaagacaagttggacaaaaatgaccgaaagaaacggaatgacggaagaagaactcaattgacagcaagaagaacttttttg

SEQ ID NO: 255 - DNA, 405 bp, Cyanidium caldarium
  unsure at all n locations
  Clone ID: LIB190-005-Q1-E1-G2
cgagacgcgtgggcttggcaagtctatgtagaccaacatttgcttggttccggaaaggtaaaagacgcagcaatagctagtttacaagggaatatttgggcgcgttctgcgggttttcaagcttccacggaagagttgaaaaagttgattgcaacctttcatcaaaccaaagaagcagctcaaaacggtatttttttggggaataagaaatacttttttttgcgttcgacagaagatactatttatgggaaactgggtgacgatggctttgtagctatgcaaaccaatatgtgtctcatcatancgatatttaccaaacccgtatctgccgccgagtgtgcaaacggtgtaagaagaatagtcgattacctgaaaagtgcaggttactaactttctgtcgcatga

SEQ ID NO: 256 - DNA, 258 bp, Cyanidium caldarium
  Clone ID: LIB190-005-Q1-E1-G9
gtccgcaacagcgaccgcccacgcgtccgcccacgcgtccggtacgaccaggagtgggaatagtatttggcagtttggtgaatgcatatgcaaggaacccagtattgaagcagcagttatttggagtacacgatattagggtttgcgttaacagaggcagtaggactgtctgcattgatgatgagttttttgatactgttttcatagtataggagaaacaagaagtagaatacaaatactagagacagaagaggagtt

SEQ ID NO: 257 - DNA, 333 bp, Cyanidium caldarium
  Clone ID: LIB190-005-Q1-E1-H1
ccaacgcgtccgcccacgcgtccgcccacgcgtccgcccacgcgtccgggaacaatgcacctcatactgctgggttccagtacagacctatgaaacttatcaatgttctcaagagaagaagaaggagtacagctatccttgtcaaacttatgagcaggtttcaactacttaccagtgtggtcagtacgagtcccaacaagtttactaccaatgccaaaagtataaggaggttactcagcaagaatgccagtacgtccaagagtcgtattgtgtcgagtatgaagaatgtcagcaagttacccaggaagtttctccttcagaaattgtctacta

SEQ ID NO: 258 - DNA, 419 bp, Cyanidium caldarium
  Clone ID: LIB190-005-Q1-E1-H10
tccgggtccatcagaagacattacatgggagccaaggaacgtagtaaaccacagagtcgctcttctaaagccggccttcagtttccagttggacgtgtaagtagattcttaaagaatggaaactatgcagaaagagttggagctggagcacgcgtgtatttagctgcagttttggaatatatgactgcggaagtgttggaactggcaggcaatgcagctcgtggtaacaagaaaacccgtatagttccacgtcatattcagttggcagttcgtaacgacgaagaacttaacaagctgttgggcggtgtgactattgcttcaggtggcgttcatcgcaacgtccatcccaatctgctaccaaagaagaatgcaacggaagacatgcactaaagttttccttgaactggtgtttttgaaca

SEQ ID NO: 259 - DNA, 402 bp, Cyanidium caldarium
  unsure at all n locations
  Clone ID: LIB190-005-Q1-E1-H11
gttaggaaaggcacaatgtcattgacagcaccgttcaagtttagtccacctcctgtgcatgtcaaaagacaacaacaaatgtacaatctgatacttgaatatgcaagaagaaaaggaatagacagaattgtagagatgaacggcaaatggtggatatatactaggacacctcccaatcgaaaggcactgcggtattggtatgacatggactgcgtggtgttgaacccagtcaaggacttacaaacggccaaagcttatgcgagaagagtaaaagaagcagtggagaagagaactacggtcgaattgcccaaacaagatatttgtgtacgacgtagcgacgggaagaaacacggagtggtcgctangagaagagaagatattgagtttgcccaagatacagcg

SEQ ID NO: 260 - DNA, 447 bp, Cyanidium caldarium
  Clone ID: LIB190-005-Q1-E1-H12
gcgaccatcaggcgacttgatcgttttttgcaccagaataacttttgcacggctgcttccgatgtttccaagtctactagttggttacaagacggaagtttaccaaaggaactgttgactttttcagggttactgagacaccgtgccaactgtcgtcgaaaactcattggtttacctcacgcagctgtgttggtgcctttttgtcttgtgcaaggtcaactttccttattatttacttggcgttcgttgttggtcggaagtcataaaaaccaagtgagttttccgggcgggaagttggacgcgcaagataaaggtgaccctgtacaggcctcccttcgtgaaacacaagaagaaatagggatattaccagaaaatgttattacactaggtttatttgatgactatcgctctatcaatggttattgcgttacccctgtaattggcttt

SEQ ID NO: 261 - DNA, 356 bp, Cyanidium caldarium
  Clone ID: LIB190-005-Q1-E1-H2
cccacgcgtccgcccacgcgtccgcccacgcgtccggaggtgtatgatgcaggcaaagaagtgacgcagtagatcagagagtaacacatgcaagtaggtaaagcgaacgggtgagtaaagaggtgtgaaagagtggaagaacatgaaagcacagaagaatgtaaggcggcgtcataatagaaatccgaaaggagtagaagaaaagagagagaagaaagaaaagaagagaaaagccgtactgaagaccgacacaggtactcgaggagaagagagaatgctgggtggagtagcgaaacaagagaagggaagtaaaaggtaagaaagaggaaaggtttacgagagaagggagtagaaag

SEQ ID NO: 262 - DNA, 293 bp, Cyanidium caldarium
  Clone ID: LIB190-005-Q1-E1-H3
acgcgtccgggaatgagcgtttgtcgcatttttgtacgcaaccttggatatatgtggaagatactgcttccttggcatccgcttatcatcagttgatattgcatagtgtacagcgagtgttggttatacaacatgaaacaaagcagttgataggttgggtagatggaacaagcataaggaaagcatttactgtgcagctatgtagatggattactcaccgtttggacaacaacaaccacaatagcagcaacagtaaataaaatgtattctaaaaaaaaaaaaacaaaaaaaca

SEQ ID NO: 263 - DNA, 183 bp, Cyanidium caldarium
  Clone ID: LIB190-005-Q1-E1-H9
aaacaagtcagctggagttagagcaagaaagaacttgcaagaaatcaaaaaacttgctcaagaactacgcatagagatacaagcgacgaaacaaactgaaaagtgatactttcaactgtgcagaatcaaccatggcttgtgaaactattccagtttttcaaataaataccttttttcgtttgt

SEQ ID NO: 264 - DNA, 442 bp, Cyanidium caldarium
  Clone ID: LIB190-006-Q1-E1-A1
gtacggtcggaattccggggccaccacgcgtccggcagtgaacgtgagggtagttcatcatggttgagacaaactcaagatggtgttagtgcttctctttggactgttcgtctcttcctccaaacagttattttagcattctctgccactatcattggcttggatggacgttaagcaaacaacatatggaacgacagcttattctatgatgggaagtacattaacttttgtgcttattctgcctcttctgttgtagaaggaggggaccatggagcgtgtaaatatgtcatggcgttggcgtctataagtttgattctagtctttttcttgtggctttttacatttgtagatgcgttgtatcctattcttaccaagttttggtttattgaattgggtatcaacgtgtttcaaacaatgtggtggttggttggaacaattgttg

SEQ ID NO: 265 - DNA, 436 bp, Cyanidium caldarium
  Clone ID: LIB190-006-Q1-E1-A11
tggttcttccaggatggcatttgttagcacaacgtttttgaagaatcgcttgagctcaagacatagtcttttagaatgttacaagaatcgtaatcgatgttcctcctgtcatgtagtagtatgggctatgacagcttccaacggaaaggaatcatccgccagaaaatccggtgcctccgataaaccaacagcaaaatctgattcgtcgtcacaacaggagacaaagaaagaagaagtctccaaagcttcacaagcaaaggctgaagtttcaaaatctacctcgactccagatgctgcaaagacggtaactcagaaacaaccaacaactgtggaaaagcaaactacaaaggagccagttgaacagaaaaaggctgtttcgaataagccaaaatggtcaaaagcattgccttttatgttgtggccaaaaaatctcgat

SEQ ID NO: 266 - DNA, 325 bp, Cyanidium caldarium
  Clone ID: LIB190-006-Q1-E1-A12
gcacaagaataccaattttattgcagcggctgagatggacaagttgagtaatggttcggtaaactttcaaggaaaacgtgtcctttgtagagtacaccttaatgttcctttgggtaaacaaacaggagcaattaccaacggacaacgtgtgcgagcaactcttcctagcatcagatctatattaaaaaaatgagcacagagcatcgtacttctttcccaattgggtcgaccagaacgaaaagtggacaaaacatactccttaaaacccgtaacggcatatttacaacagccgttgggtccaaccggtcgtctttctggaagactg

SEQ ID NO: 267 - DNA, 413 bp, Cyanidium caldarium
  Clone ID: LIB190-006-Q1-E1-A3
ggggacacgtccggaggactgtgagtgatgagtgcagttagtcaagaagaggcgcgagaattgttggcaaagttacgagcaaagccggagaacaaattttgctttgattgcaatgcaaggaaccccacttgggcttctgcttcctttggagtgttcatctgtttagattgtgcaggagttcatagaaaactgggtactcatgttacatttgtaaggtccactattatggatacttggactccacatcatttacgtcttatgatgttgggtggtaatgccaaagctcgagagttttattcccaaaatggttggagtttggatagtgggaaaggtattgaagagaaatatacaggtcgtattggacagcaatataaagcgtatctccagaaacaagcagttatagccgaagaaag

SEQ ID NO: 268 - DNA, 455 bp, Cyanidium caldarium
  Clone ID: LIB190-006-Q1-E1-A9
tcccggcgacgcatcagcgatccggaaaaggtccaaacaagagaagtcagcagtggggaaaattgggcaatgtacagggaagtatgacccagtaatgaggagtggagtaaacagaaaaggaagtaaaaggagggaatgaagggaagttatggcaaaaacacgtgccagcagcagcggtaaaacgtgtgtagcaagcgtagagcagaagaactgggtgtaaaggtcgagtagtagagtaagtgtaaaagggaaaggaaaggagagaaagaggaaagggatgaaatgcagagatctctagagaaaggcaagaaagaaaagaaaggaagacacagtaaatgaggcgagaaagcataggaagtgaaacggattaggaacccgtgtagtctatgcagtaaaagaaagaatgagtaagaaaaaagggagtcattccaccagggaagttatggcaaaaacac

SEQ ID NO: 269 - DNA, 320 bp, Cyanidium caldarium
  Clone ID: LIB190-006-Q1-E1-B1
gtccgcccacgcatccgcggacgcgtgggttttctcgatactcctccgacttttccctggcgatatttaaactgtccattagaaacattaatgtgagaaaatgactttggaaaattggagactggaagaagagattattaatccttacctctttgagtttgagagttttgatggactgaatatcccatgttggatgtatttgccaaagtcgagctctaaaaagtttccaatactcgttcacattcatggtggaccggaacagcagtcacttccagtttttactccgttgtttcagtacttactgttggagaaaggaatag

SEQ ID NO: 270 - DNA, 437 bp, Cyanidium caldarium
  Clone ID: LIB190-006-Q1-E1-B10
cccacgcgtccggggagtgtaagtttgttatcgcaggttcgcaacatcacgagtttgaaagcatgctgcctagcgggtatagaaactcaacgaggtatattgaaccgttgagtaaagaagaatttaaaatatggcaagcactggacgattatcctgaaacatttagagataatgaaagcaccattgtggaccttacgggtcgtgttccaagaacgatagcggaactgatcgaactgagtcgcagttttcctaacttcagctttgaagaattggtcgcatggtttactaaaaacgcttttggagatatgaagaagaggcacgaagcatatctcgactcattgacggaaaaacagaagaaagcgtcttataacatgctctacgagctatttcttggcagggaaactccagcaattacattgtttgatagtgcctatcga

SEQ ID NO: 271 - DNA, 426 bp, Cyanidium caldarium
  Clone ID: LIB190-006-Q1-E1-B12
agagaccaaaagatgggactggaagagagagttttcattgccttgggttccaaccttggggacaagtctgccagtttattcggagctctgcaaaagctcaaggaatttgccaaagtcgttgccacttcatttctttacaagacagcacctatgtatgtagaagatcaaccatcattttataacgctgtgtgcgaaattcggacagaaaaggaacctcttgacctcttacatcgacttcaagaaatagagaactcgtttggaagagttcgaggaggtgagagatatggacctcgatcactcgaccttgacatactgatatatggtaacagaatcataaacaccgttgaacttgtagttccacatccacgaatagcagaacgtgattttgtgctttttcctttgagagacatcgatccgaatatgccg

SEQ ID NO: 272 - DNA, 452 bp, Cyanidium caldarium
  Clone ID: LIB190-006-Q1-E1-B5
gatgcagattggaaaggaaagaagaaacctcgtacggacaatatcaaatatccacaatgaagtacatgtggatttgacctccttcttctttagttatttgcatagcagaataagtaattgctttgatttccgttccctgtggatgtcgttgtgtatcgaatacttctccttgtccaatggcctccacgagaaacaaacctaatacaagttaactcgttgcgtttgtggcaaggaatgcctggtttaccgtctagttgaatacgtgttacctccagttgacatagaatgatataattggctccatattgaaagaggcactcatctagaaatttgtaaaggagactgtacaagtcgtgtccttgtgcttgaatatgtatcgaaccaatttcagggtccggcttgactgttttcaaatctgtcatataaccgaaataagacaaaccttgtggcgc

SEQ ID NO: 273 - DNA, 448 bp, Cyanidium caldarium
  unsure at all n locations
  Clone ID: LIB190-006-Q1-E1-C1
gacgcgtccgccaacgcatcngcggacgcgtggggtcctctgccaaagattgcttttattgcatctcccaacaatcccgatggttctgttgtttcggatgatgacttgagagagttgccagacttgcctatgactgtggtattggatgaagcttattatgaattttcaggaaagacgcacgtggattggctgaaagactacgacaatctcatcattttgcgtaccttttcgaaatgggcaggtttagcgggacttcgacttggctatggcattttccctcgtagtataatgagccaagtatggaagataaaacaaccttataatgtcaatgtagctgctcaattagccggaatagcgaaattggaagaaaaagattatatgccccaacgagtggaaatgataaagtcggaacgccaacgattctatcaacgcatttcgaaatatgaat

SEQ ID NO: 274 - DNA, 435 bp, Cyanidium caldarium
  Clone ID: LIB190-006-Q1-E1-C10
cacacgcgtccggctcttccttatattctttgtgcttggacaatggttgcaaagactgctctgagttgcctctttctctctttccttatcgctgccgcagttgcagccgacgtagtttcagaggagagatggggatatgctcagcaaacccaacaacagcaacagtgccaacaagtatgtaaacagtatgcatactatcagagtccagtctgcacttccgtaaccacacagagcccatactggacccaatgctcgaagactgtgcaaacctttgtcccaagccagtgcagtacttatacccaatctcctacatggacctattgcagcacctacaccaccactagcgtaccatctcaatgcagcaaggccgtgactacttatactcaaacctgctgtgcttatgcccaacaaacttcctatgcagtcagtaccgag

SEQ ID NO: 275 - DNA, 344 bp, Cyanidium caldarium
  Clone ID: LIB190-006-Q1-E1-C12
ccacgcatccgcagacgcgtgggaagcgacttggttatcataacacgagagacgcggatgctgaggtagaacgtagtggccgcgttgcatctcacgtggaacctcggcgtaaaggtccacgacgttctgtggagaggtcattgtgatagatgtcaggcagctacggcaagaagtatgcgtttccgtgtcaaaagactatccagatgtggaactgccacacatctcctccgttaccacagcaaggccattctggcccaagcgccctcagtttgatacgattgtgattgaaaatcgggttgtacatatactcactcacgtagcttctacgatggctggaccgacag

SEQ ID NO: 276 - DNA, 430 bp, Cyanidium caldarium
  Clone ID: LIB190-006-Q1-E1-C7
ttccggggccacccacgcgtccgccaacgcgtccggaacaagtggaatattacagacagcatcactggaagtgtaccaagtgtgactgggttgtgaaaagagcaatgaatagagcacctagtttcaaagacccttggtggaatatacatcaacgtagatgtgatggacaattttataaagtcaagcaaccaccatcttataagaaaaggtctctaggtatgcttccactagaaacgtatttttccaaataaaaggacaaatggaactttaaaaaaaaaaaaaaaaaaaaaaaaaaaaaaaaaaaaaaaaaaaaaaaaaaaaagaaaaaaaaaaaaaataaaaaaacaaaaaaaaaaaaaaagaaaaaaaaaataaaaactacataaaaataaaaaaaaaataatttaaaaaaaataataaatgaaaacaa

SEQ ID NO: 277 - DNA, 203 bp, Cyanidium caldarium
  unsure at all n locations
  Clone ID: LIB190-006-Q1-E1-D1
atcttatcgacctgctcccctttattgttcttgatgaagtanacgcggctttggatcgcgataatctcgaaaaggttgcaagatatattttacaaaggtcaaaaatgagttgcgagcaatatatcgttatttcattgaaggataagttttatgaaatggcagatgctctgattggaatatatcgagatatggacaagtcgtgt

SEQ ID NO: 278 - DNA, 420 bp, Cyanidium caldarium
  Clone ID: LIB190-006-Q1-E1-D12
cagacgcgtgggcggacgcgtgggtttggaaattggtttgctgcgtcggtgaagcgcacggaaatattttctagtcatgcaaatatttgtgaaaacgttgacaggaaagaccataacgttagaggtcgaaccttcggatactatagaaaatgtgaaatcaaagattcaagataaagaaggtataccccctgatcaacaaaggcttatatttgctgggaagcaactcgaagacggaagaactctgtcggactataatattcaaaaggaatccacgttgcacttggtattgaggttaaggggaggtattatagaaccaactttggcagcattggcgagaaagtacaactgtgacagaatgatatgtcgcaagtgttatgccagattgccagcaagagctcaaaactgtcgtaagaagaaatg

SEQ ID NO: 279 - DNA, 455 bp, Cyanidium caldarium
  unsure at all n locations
  Clone ID: LIB190-006-Q1-E1-D3
ggtccgtagttcacgggtggcacgacgcgtccgttgagacgacaacaacaattggttgtgttgtttgggctttttgttttggggtttgtttgggtgaagatggcgcactatcaacattaccgagctagtacagcgggtatagctttgggagaagcactttctgaactcaaggaacagaacctctttacggaagcggaagaagatgtgatttggaggaagtttgaccgtgccatgacagaagcccttgcgtccaacgttgtggatacacaccttacgttgaaagggagtcttcatcactatcgattctgtgataacgtgtggcaattcttcgtgaaagacgcacaagtgaaatttgacaaaaggtcggattttactcccgctggttatctgaaagtanttgcttgtgattatgtaaagccaaccaacccaaagtctagttaattttgaagcccaat

SEQ ID NO: 280 - DNA, 344 bp, Cyanidium caldarium
  Clone ID: LIB190-006-Q1-E1-D4
acgcgtccgcacaaaaagtactgtttatttactagacagaagctgatacagctgctgtcgtacacaaacaacacaagcaaacagttggaagccgactgtgaaaccaacccacatttccagactcccaacagaactgcttctcagttagttacgcaatatgcctagtcataaggaacaaaataaaggaattaaaatatcagctgacggttacgcactaaagttgagcggtattcggttggacgtagacggcaatttggtcactatggtggacgcagacgacctcatagccctcatgtttaaagaaagcctcaaagaaaagtcaaagctgcatgacccaaaatttt

SEQ ID NO: 281 - DNA, 55 bp, Cyanidium caldarium
  Clone ID: LIB190-006-Q1-E1-E1
acgcgtccgcaatgcgccacatcaaaaaataaaaaaaaaaaaaaaaaaatgggcg

SEQ ID NO: 282 - DNA, 422 bp, Cyanidium caldarium
  Clone ID: LIB190-006-Q1-E1-E10
tggttcaagcatatcgtcaagaagcagagaactggcgttacgggaatccatatcaacaaacgcttcatttggataagattgaaacgacagacaaagttcgaatgtgtcgccactgtgcacgacaacaacgaatttccgcaaatgctacggaaatagctctctttgctattcaaagagcactaacgccatgtttagctggactttggtatcatcaacgcgaagctacgtgaaaagaattcccatgacaacatcatcatttatcatataataccaacgtatcgactgtatctggtaagaatagtaattcttccccttttttcttccacaaatgtatgtatatctattcgaccacatctatgcccagttagtaagcttcatatcagcttaactaatcttttcaatcataaacaggttctacatcc

SEQ ID NO: 283 - DNA, 346 bp, Cyanidium caldarium
  Clone ID: LIB190-006-Q1-E1-E11
gattcatttggcagacgctgttccttggaatgaggactttacttgtttttggaaaggctctattcaatttgcgaaatatttcaagcttctttttggttccacacttgtttatggtattgtaggaaagagtgcgagtcctgatttaccggaattggaaaaacatcgtctaggaggtattggctcgttacgtggatattctacgggtgctctaggtactgctacttgttccttacaacaaagtgtggaacttcgttttccattatttccacgagttgctggagtttgtttttatgattgtttggataaaacggagtgttgttggagaaatccaacgcgtttaggtgta

SEQ ID NO: 284 - DNA, 428 bp, Cyanidium caldarium
  Clone ID: LIB190-006-Q1-E1-E12
gcagactgactagctactggaaaaaacctgttgaagaccgcctttgctcgctctcactgacaaacactcgtaatatgtggtgcttctatgttcctacttcaattttatatacacaaactatgattaccaaggaaattgtacatcttaagaacgatacaaaggtctttgagttcttttgtggagtctcgtacggtggacgcaaagctatcacagttcaacagagtctcgtaaaccaacaactctagtccatctagagactttcagagaaattatgagaaaagtatttcacggaatagaagttgtgagattttggactgtgcagtttgcaatcatccaacaagcaccagcctactagtttgtcgtgcttgtagcaccaaaaagttcctggttgtagttacatattcacgtgaagaaagagagaaagcaca

SEQ ID NO: 285 - DNA, 370 bp, Cyanidium caldarium
  Clone ID: LIB190-006-Q1-E1-E2
cggtcgagattcacgggtgcccgcacgcgtccgcaaagtttggttgttttcttggtagcagttgtacattcaacatcatcaaatgccaaagggaggaaagaaagattcttcaaagaaagaagccacaagtaaacctgcagcagcagatgctacaaagacgacagaaaagtctggtccggaagccaagttgaagggaactggtgcaaagaaacaataaaaagttgactatgcatgtgtaagtatttgtggattttccagtagaacaagctaaagttgtttctgaaggcagtcctgttatgttttgtgagttctgtttgatagtttccagctattcttttggtagtgaataaagagaaaattttttaatatt

SEQ ID NO: 286 - DNA, 439 bp, Cyanidium caldarium
  Clone ID: LIB190-006-Q1-E1-E5
gtaccctatgtggccctttttctatttggcgtctcttggaactcgtaataacacttttctttctttggcgcctttaggggaagttatgtcgggattcatagtacgggttttaaggacttcttgttaaagccagagcttctgcgagccattcaggtgcgtcaacccacgtatagaaaggtaacttgcttgacttggacacgttggacaggactgtggttttgagcacccttcggaagtccaagaacagtgcattccacaagcaatactaggcggtgatattgtatgtcaggcaaaaagtggtatggggaagacagcagtgtttgcccttgctgtacttcaccagttggtacccgaagacggaaaagttagttgtgttgttctaggtcataccagagaacttgcatatcaaatagctcatgaatttgaacgattctcaaag

SEQ ID NO: 287 - DNA, 403 bp, Cyanidium caldarium
  Clone ID: LIB190-006-Q1-E1-F1
gcgtccggtaattagagatgaaattatggagaagttcagtccagacatgcacacggaaactcctcaatttggaggggttgccaatttggttcgttcttttgcaaaaatccatgaaaacaacctcaagaacagggcttcttcctctgacatttcggatccggcggattatgatcgtattagcccagatgaccgcatttctattttgggattgaaggacttgaaacctggaaagccccttaccgttcgcgtgaagaaacaaaatggtgagacctttgatatccaagtgaaccattcatttagtgaagaacagttcgaatggttcaaacatggttccgcgttgaacaaaattaaggaggacttgaaagcaggtcgcagacaaatgtacatgaagtgtgcggaccct

SEQ ID NO: 288 - DNA, 439 bp, Cyanidium caldarium
  unsure at all n locations
  Clone ID: LIB190-006-Q1-E1-F10
cattttacaagccaaggcgtctcttcctgcttgcaaacaaccacgtttggaaccaaagcgagcacttggtaacaaagtattgcaacaaaaagtaaaccaatatttgcacaaataataaccaaagatggacttgttggcgtctacggaaattagggaaggaaatagaggtggcagagaccagtttagttgggagaaagtaaaggaagataaatatagagaaaactatttgggacactctattcatgcaccagttggtttatctgccaagagaaaagacccgcagtggtttaccaagcctccagcccgccaccctgtgagtaaccgcgaggaacttgaaaaaatacaacaacaagaagctattatgctgagagctagtcttcaaggtatacctgttcaggatgccattgcattggcactccaacanaccacccaagagagc

SEQ ID NO: 289 - DNA, 436 bp, Cyanidium caldarium
  Clone ID: LIB190-006-Q1-E1-F11
cccacgcgtccggtgcgtcgacgtcgcatttgtagtagtattgtggtgctctttccaaccggtttctccaacgacgcaacacaaaaatgcctcgtggtccaagaaaacatatgaaacgtttggcagcacccaaacattggatgctcagcaaacttggtggtatttgggcacctagacctagcagtggaccgcacaagttgcgagagtcactacctctcttattggttctccgcaatcgactgaaatatgcgctcaataatagagaagcagtggctattttgatgcagcgtttggtaaaagtggatggaaaagtacgcaccgataaaacttttccagcaggtttcatgggtaagcaaagcatcggtcgaaatcgaatgtaaagtgattgactatggaacctagatgtgattgaattggaaacgaacaatgaaacttt

SEQ ID NO: 290 - DNA, 440 bp, Cyanidium caldarium
  Clone ID: LIB190-006-Q1-E1-F12
gatttattggagcctcttttttgggtgccaaagaagaagaagaaaaagaagaggaggatgtcgactttgtggggaaaacccaagtctagaaacgtacaaatagaacattggttacattctttggaagaagttgaacaagtagccaggtcagtggaaccaaaattggtttcaactacagccaaatggaaaggaattgcccaaaactgcaaagaaatagctaccgacctttgtcaaatattcaacaagaatgacccccattatgaggttctattggcatcttatacaagttcgaggaagtttgaagacgaacaacatcaagtgaccaagaccaacgaacttagggatagagcagtcgagaggttgcgccattatttatcggaaattcagcaactgaaagcacagtgtgtcgaagaacaaaagttgcgttcccgactagagca

SEQ ID NO: 291 - DNA, 410 bp, Cyanidium caldarium
  Clone ID: LIB190-006-Q1-E1-F5
ccacgcgtccgacaagttataataatgaagtttccagtcactttacggagaagcagaactgggtaatgaatacaggagtctattatgagaggcgttttgaaaagaagggaccttcacctggtgcttggcaagacgcgagtagttccaattctcataaagaaggtctctgtattggcccaaactgtcaacttgtagtttgctctgttgataacctgaaagacttcttgggtcagcaagtttatgaacaactccagaaagtatactcggataatgaaagcgttttgatgaagttggatcctctcgcgaagttgttgggaagaaaccttggacaattatggaggggcgatgttcctatggagcccgaaccttcccagatggatattgtttccaccagaactgatacagacgag

SEQ ID NO: 292 - DNA, 427 bp, Cyanidium caldarium
  unsure at all n locations
  Clone ID: LIB190-006-Q1-E1-G10
acaacttgttcttagggcaacttgtcggggttttgttttggcgccatggtggtatgcaaatactttcttcgaggtaactgcaaatttggtcgcaattgtaagaacgaacaccctatgcagaatgctgcttccaacagttttggtgcttttcaaaaagagtggaaggatccttttcattccggagcgggacagtcttcttcagttttcaatagttttggaaaccgcagtgggaaaccaacgagtcaagatccttttcgttcgttcaagtcttctgggaatggcttttatcgtaaccagcgaaacaacgttgctatggatatcgcttcgtccaacgacgatgcacgaggtcgtggtagagttgcttatcatcggggaagaggaagagcanattatcaagacagtcgttttcattcaagtgaacctaatc

SEQ ID NO: 293 - DNA, 417 bp, Cyanidium caldarium
  Clone ID: LIB190-006-Q1-E1-G12
cggacgcgtgggcggacgcgtgggattgcagaccagcgactccaacatttttgcagttggcgatgttgccacatttcctttgaaaatgtatgagaatcgtctcgagagagtggaacatgttggcaatgcgagacaaatggctatgcatgcagtggatgttatttttggttctcaaaaagcttacgactatttgccatttttctattcgagagtgtttgataagagttggaagttttatggagataatcccaaagatgccacttgtttgttatttggagaaatgaatcccaagttatttgcggtttggataaagcctaatcatcaagtggttggaacctttactgaaagtgcaactcctgaggaagaaaagaaaatcgaacgaattgccagagaacgtcctgttgtggacgtggaaaa

SEQ ID NO: 294 - DNA, 461 bp, Cyanidium caldarium
  Clone ID: LIB190-006-Q1-E1-G2
cgcgtccgaacgtatatcatttcacattctccttgtagaaaactatgaagtctttcggcattgctattgttttcataagctttgttattgcatcttatgcagcagttgtatccgaaatggcatccaatgagtttcaaagaggaggatacgctccttctccttccaaggaatgctgcatgaccacttgtcaatatgcagaactttgcccaatttctcaaccaacttatagccaagctccatcttacattccatctcctacctatggccaagctccttcctacaatcaatattcttcttcgtacggttcctctagctatcgtctcttaactgcagacgaaaaccaacttgtgagcagaggaggttatgcaccaacaagccaatgtattctagttcctatccaatgctgcactgattgcaaacaatgctatgcggcatggagtttccaaaatactgatacaatg

SEQ ID NO: 295 - DNA, 459 bp, Cyanidium caldarium
  Clone ID: LIB190-006-Q1-E1-G6
ccacgcgtccgcagctgtatcgcggacatagaatggcaacagataaaacgattcgttgcagcagccagtggattcatcttgtagcaccaagtggctgtttattgcaaccccactgttggaagttgcttgtactgatgggcagcgaattgaaatgattcctttgaagaaagatataaaggaattgtttttctctactttaaagaagaactttgagtcgaacgaagcgtcatgggagtgcagtgtagttgaaaccgcagttgctgtttttatccagtattatgaacagtgtgtggaacagtactatctagcaagcaaagattatgagctacctggttattccaaagtaaaacagattcggagtatgattgaagatgttctacaaatagagaaggaacttggaaatatgcgtcagactcttgttggcgttcggagtcgtctttgtactttcgaagctgcatc

SEQ ID NO: 296 - DNA, 431 bp, Cyanidium caldarium
  Clone ID: LIB190-006-Q1-E1-G7
ccacgcgtcaggaggaacttgccacaaccggacctattcttgttgctgcttgtggaaatcctgtagtagaaactggagctgcagttatttattttctcgatgttgccacggcttcccttgttggtcaggaacgtgtcgtcttcaatatgagttgttcagtttggggaatcagtgtttgtgagagaaatggactaatagctttgagttccaacgatcactgcattagtatgattcgtatatgtttagagaacgagtgggggtctcaaaatagattctttattgttccttctgcttgtagaggtcaccaacataatattccaagtattgacttttcaaccaatggaagatttattgcctctgttagtatcgatgaaacattacgagtttgggatctctcgacgggtcaatctattggattttctgaaggttgt

SEQ ID NO: 297 - DNA, 180 bp, Cyanidium caldarium
  Clone ID: LIB190-006-Q1-E1-H1
ggtcggtaatacggggccaccacgcgtccggtatgggattgcggtgctttcttctctccaaatgcctattaacaatcttaacaaaagtgccatgttaagaaaagcaaactttgcttacaaatatatgggaagattctccaataagttcaacctcctaaagaactttatctttggaaaaat

SEQ ID NO: 298 - DNA, 274 bp, Cyanidium caldarium
  Clone ID: LIB190-006-Q1-E1-H10
cggggccacccacgcgtccgcaggaccttgtccgttggatgacatcggtgtacccacgtctgctgctccatcaccgcagtcggctgttccttcattttcggaacctagtttcgggcctccttctggacctagttttccaacttttgatggtgagccctcagctccatcatcattttctcccttcggaagcagcagtggacctgaatttttcccgatttaaatagtacagaaccaagtttagggaagtgtacaactccaaagggggttggttagt

SEQ ID NO: 299 - DNA, 408 bp, Cyanidium caldarium
  Clone ID: LIB190-006-Q1-E1-H11
gataatgactgtgttggaaaggagagaataggacatatttcaaagaatacagaatatcgctccattcatttcatttcattgttagtgtttatcctgcaaaaatatttggactacattgcaaaggaaaactggaaagaggttatgatgcagatatagtcgtttggagtcctgaaatgattcaaccttttccaagtcctatttgtcaaaagtttcagcctctttgccaacaaatgaacagcactttgaaaggagtagttttcgatacttttgttcggggtcgaagagaaaatggaaaagtcgtccttgatggaagaagcaagcacacaatgggaacaagatggaaaggaacaataggaaactagttcgaaagcacgaaaacagaaacaacgttgcgaaagactaaagaat

SEQ ID NO: 300 - DNA, 212 bp, Cyanidium caldarium
  Clone ID: LIB190-006-Q1-E1-H12
cccggatccatccacgcgtcctgatagacggcaggactagtatgggatatcctcctacctagatggtatttaatcccgaggcaacacagccatatagcaaagtgaataagcatgtcatgtaatgactgtatgagaccaactagtcaggacttttactaccgactctgaagaaacgcttgacttgcttcatcagtttatgtcattcgaccctt

SEQ ID NO: 301 - DNA, 429 bp, Cyanidium caldarium
  unsure at all n locations
  Clone ID: LIB190-006-Q1-E1-H3
cggtccgtagattcacgggtgcccccacgcgtccgacaagttataataatgaagtttccagtcactttacggagaagcagaactgggtaatgaatacaggagtctattatgagaggcgttttgaaaagaagggaccttcacctggtgcttggcaagacgcgagtagttccaattctcataaagaaggtctctgtattggcccaaactgtcaacttgtagtttgctctgttgataacctgaaagacttcttgggtcagcaagtttatgaacaactccagaaagtatactcggataatgaaagcgttttgatgaagttggatcctctcgcgaagttgttgggaagaaaccttggacaattatggangggcgatgttcctatggagcccgaaccttcccagatggatattgtttcaccagaactgatacaga

SEQ ID NO: 302 - DNA, 408 bp, Cyanidium caldarium
  Clone ID: LIB190-006-Q1-E1-H4
cccacgcgtccgcaaaagactcaagtaattgtatatttgtttttggttgtgttgctgtagggcaaatatgagttcctttgatccggacaagttcaaacaagaacaaaaagctcgctggaatcaaggagctttatccacgtggaccctgtggaaaaaaactcaagtagaagatactccagcaaagttcttcctaggcctagtacctattcgaccaggagtgaaaatcttagaccttgcctgtggtagtggggaaacctcccttcaagttgctcacctagtttccagccacttaaaggatgaagccaaagacgcaaagatagtttgcgttgatatttcggacgaaatgcttaaagttctcaaccaaagagcacaggaaatggggctagcaaatatggtggaaacccgctg

SEQ ID NO: 303 - DNA, 399 bp, Cyanidium caldarium
  unsure at all n locations
  Clone ID: LIB190-006-Q1-E1-H5
cacgcgtacgcaaggtccgagcaattagttctgcggtagataaattggacaaagaatcttggagtcatgttcgatcagagatgatagaaatgaaaggattgtaagcttctaaagcagataagattggggaatacgttcttcgtcgagataatcctcaaaggatgctttcatctttatatgcggacgctcatctttctgcaatggcacgttcctctttggaagacatggaactcttattgaaatatttaggagacttggggatagaagatagtcgtcttatctttgacctctcattagctcgaggattggattactatacaggtttaatatttgaggcaattttaactancgatgaaggcacatctttaggctctataggtgctggaggtcgntatgata

SEQ ID NO: 304 - DNA, 357 bp, Cyanidium caldarium
  Clone ID: LIB190-006-Q1-E1-H7
ggaccgtccacaagacccacaaaaagtatgagtcgattcacaaaaccgcttcaaaatatttctttaccgcaacgtgtacagcaatttttagagccttctgtttggttggagttttcaccactatcatccttgtgtgacgctatcaacttgggtcaaggctttcctgattggaagccacccaagtttgtaacggaagctgcatcgaaagctacgagcgacccaagttggagtcagtatgcacgttcgagtggtttaccgtctttggtatcgactattagtaaaacttatgcgcctctgttgcaaagggacattgacccttttaaagaagtttgtgtgactgtgggagcatcggaagct

SEQ ID NO: 305 - DNA, 404 bp, Cyanidium caldarium
  unsure at all n locations
  Clone ID: LIB190-007-Q1-E1-A1
ggcaaaggcagtgagaattggtgctgaaggttacaggttaaagttggacggtgcagttcaagagatagacggtcgttctgtagttctggtagatgtggatagtattacccctctcatgtttggaggtagtatgaaagaaaaggccaaattgttggatgccaagtttctaaggaagtattatgaggagaacaaggacttcttcttcttgtcgactagagaagagaagaaaatgtttgtgacgttgcaacttgccagggaatatgcagagctggtagatgaccaattcttgaagggcttcttcgagaaggctctggagtccgctcagaagacgttttaatttgtcaagtanagtgtagtgtgcgtttttctgtgtgtatttgtctctgtgtgtgtgtgtctgtgtg

SEQ ID NO: 306 - DNA, 371 bp, Cyanidium caldarium
  Clone ID: LIB190-007-Q1-E1-A10
agatgatcattagtggaatgggagaactacatctacaagtttatttggaacgaatgaggcgagaatatggagtagaatgcgaagctggacaacctcaggtcaattttcgtgaaacagtaacgaggcgtacaaatttcgactacttgcataaaaagcaaactggaggtgcagggcagtatggtggtgtcattggatacattgaaccctccgaagatcctttgcacaacgaatttgtcaatcgtgtagttggcaatgctattcctcctaaccttattccagctgtagaagcaagtttccgggaagcttgcgagaggggctccctgacaggtcaccgagtacaaggcgttcgcatggtattggaagatggaaaa

SEQ ID NO: 307 - DNA, 309 bp, Cyanidium caldarium
  Clone ID: LIB190-007-Q1-E1-A11
tcgaccggttttcttggtagcagttgtacattcaacatcatcaaatgccaaatggaggaaagaaagattcttcatagaaagaagccacaagtaaacctgcagcagcagatgctacagagacgacagaaaagtctggtccggaagccaagttgaacggaactggtgcaaagaaacaataaaaagttgactatgcatgttcctgttaagttttgtgagttctgtttgatagtttccagctattcttttggtagtgaataaagagaaaattttttataaacaaaatccaactgtaaaaaacaaagtttccgg

SEQ ID NO: 308 - DNA, 424 bp, Cyanidium caldarium
  Clone ID: LIB190-007-Q1-E1-A12
tgcgtcacgggcggaaatccgggacgagcccacgcgtccgcaacgattcggtgtcgctgctgaacacgtttatgacgtagacgagaataccaagttgcgttttggtgggaaagttcgtcacggagaatcggacccggcaggatatgtcattgcccaatatgactttacggtttccacagaagattttccgataaacgttcgtgcacgtgcgatatgtaaaagtaaccagtgcatcggcgatattcgtgccaaaaagaagtttgaagtggacgaagacacttctttattcttcttagccaaagcttgtactcaggaactaacaaaaggaagttatattattggtaaagctggagtgacacgtgactttcgtttgggtgaaaacacttttcggttgggtgcggtgtgtgaccaagatggaaactgt

SEQ ID NO: 309 - DNA, 359 bp, Cyanidium caldarium
  Clone ID: LIB190-007-Q1-E1-A3
tcataacgtaaacgatgtggggtaagagatgaaagaccactgcatgaggataaggaatctaactgagtaaggaaaataagaacatgaggaaaaaagaagcaaatacgggaaagcaattaaagaaaaaagaaaaaggaaaaaactgagtatcaggaagaaaagagggagtagatgaggaaagaaagatcaaggaagtaagagtaagagaaggagtaatgtgaatgaaagcaggaaagtatttgaagaagagagtgtaaagcgcgtaccttttgcataatgtcccagcgagtgaaagaggaagcaaaaagaaagaaaaagaagtagccaggtaagacccgaagctagttgatcttatgctg

SEQ ID NO: 310 - DNA, 392 bp, Cyanidium caldarium
  Clone ID: LIB190-007-Q1-E1-A5
agcgtccgaacgagaacaatctcccattcatcttgtgacagacttggttcttccaggatggcatttgttagcacaacgtttttgaagaatcgcttgagctcaagacatagtcctttaaaatggtacaagaatcctaatcgaagttcctcctggaatggaatagtaagggctaataaaacttccaacgggaaggaatcaaccggcaaaaaatccggtggctccgaaaaaacaacaagcaaatctgattccgcgtcacaacaaggagacaagaaagaaaaaatttccaaaagctcaaaagcaaaagctgaagtttcaaaatccgcctcgactccagatgctgcgaagacggtaactcagaaacagccaacaactgtggaaaggcaaactacaaa

SEQ ID NO: 311 - DNA, 434 bp, Cyanidium caldarium
  Clone ID: LIB190-007-Q1-E1-A6
gagacggaaagagccatgcctctgaagaaaaaaggtggcaaccaccaacgcaaagaagaaatagctcacaatagactagaatatttatggcaaatatctttgagttatgcgacgacgatgccaagtatttcccgtttctatgtgtccatcatgtgggagatgggaaaacgactcaattatcggttggataatgttaccgtgaaaagctgtttttgtaaaaagtgctataccgtctggataccaggaaagaccgtacaaatacgtcaaacaaagaatagcaagagaaaacgggtcatttacacttgtctgtattgtaagagacaaaagagatatggcacggctcaccgtcgctaatcctttttacaaagctccacctttccacaacatgtcgatggaacgaccgagggcaaccataaaagcatcaatctcttcct

SEQ ID NO: 312 - DNA, 405 bp, Cyanidium caldarium
  Clone ID: LIB190-007-Q1-E1-A7
ttctatatcgccatcgtaagagtaaagtagttgcgaataatcatgaggaacaacgaggcttgctcgataaggattccaccgataactacctttcagtcgtcgatgacgagtcggaggaatctttcgattttggtgaagtaatgatacatcaacttatacatactatcgagtttgtattgggagcagttagtaacacggcaagttatcttcgtttatgggcgcttagtttggcgcattctgagttgagcttggtctttttagaaaaggttttgtataatacgatttatttacaacatccgatagccattatgatcggtttcttactttgggcatttttgactgtaggcgtgttgtgtcttatggagtccctttctgcctttttacatgccttgcgtttgcactggg

SEQ ID NO: 313 - DNA, 374 bp, Cyanidium caldarium
  Clone ID: LIB190-007-Q1-E1-A8
gtcaaagaaggaggagagcaaagcaacgaagaaaactcaaaataaacctaccccaaaaacgaccagcacctcaaaagtagagaagaagatcactaaaaagaattcaggattgtcaaacaaggagaaagctggaaagacagctgctaacactaagtccaaagccagtcagaaggcggcaggttctaaaagcaaaggtgcagtaacagtaaattctcaaaggagaactacacgggttacacgtaaagcataatctcgctagtaatttagtattttacttttggatgttgtggtatttgtgtgaatacaaaagtgttgaaattggaatttatcccatagatttgctatcaattgttgaataaaagtttttgtactct

SEQ ID NO: 314 - DNA, 433 bp, Cyanidium caldarium
  Clone ID: LIB190-007-Q1-E1-A9
tttggcccaagatctgaacgagctcatcttttggttccacagacatgtccaacgaaaatcagtccgataaaaacactttggaaaaaaccggggagaagctgcagaatgcagttcatactggaacagagaaagtttctcaagtgttgagcgacgtcaaggaaactgtgacggagaaatacaaggaatggacagcaccaaaaagtagccaagaagaagcaaaagaaaaagcacaagaagcgaaagaagaggctaataaagcttttaatgctatgaaagaaagtgcgagtgccgcttcagaggctgcatcagagaaagcagaaaaaattaagcaggagttgaaggagtgaagatacacagtagttttctcctatagtgttcttagtagtatttgtagtgatatttgtctcgtgatgaataaaacacggttattagt

SEQ ID NO: 315 - DNA, 371 bp, Cyanidium caldarium
  Clone ID: LIB190-007-Q1-E1-B1
ctccgacgagtcgtatgcccacgcgtccgctttgtgggaagattggtggattcatactcctccggtaaccagagcttatgtcactttaacctccaaagttacaataatatgtgcactaaaagtaatcccctaagaaactatattataattgggaaggagtcaaaaagttgcaattgtggagaatatttaccaactttttctaatttggaccctttggaatggactttttattccacatgttctttctatatcgttattgcaagctattagaactgaatacttttcgaggacgttcggcagactttgtatttatgttgctcatcggtggaatattgttaattatgctttcctttttcaacccctacatcaag

SEQ ID NO: 316 - DNA, 459 bp, Cyanidium caldarium
  Clone ID: LIB190-007-Q1-E1-B11
ggttggtgtttgggaaggtcttctttgtataatataagacaggaagcatgggaaaggataaacaacacgtttccatcgttgtcattggccacgtcgactctggcaagtccacaactacgggccatcttatctacaagtgtggaggtatcgacaagagagccattgagaagttcgagaaggaagctgcggaaatgggcaaaggttctttcaagtatgcatgggttttggacaaactcaaagcagagagggaacgcggaattaccattgatattgccctgtggaagttcgagactgagaaatatttctttactatcatcgacgcccccggccatcgtgactttattaagaatatgattacgggtacctctcaagctgacttgggtattctagtcgttgcttctcctccaggtgaatttgaagctggtatttcccagaacggacagacaagagaacatgcac

SEQ ID NO: 317 - DNA, 429 bp, Cyanidium caldarium
  Clone ID: LIB190-007-Q1-E1-B12
ccaaaaagggttggaacgacggattcaacgaattgtacgagttattcgagcattgacaccttcagtcggtcattcagacagtcctgttgagattcaagtggagatttggcagtagatgggactattgtgtgaagaatcgtgtaaagttcccgttgcagttgctttagcagtgatttacgaagtagatttggatgaagatgaggttgtattggagttggaatactctggatacaaaggagtgggaagaagggttgcaaggaacattgcatcaatgttggttgaatggttggataatggggaatcaaatagtgattcatcagcctgattgtgatgttaagtgagtgcttgtgtcattgcatgaaacccaatccctgatttcctcaccggattccgcaccgaaacaacaaaatgaaattaaaaaaagggggg

SEQ ID NO: 318 - DNA, 161 bp, Cyanidium caldarium
  Clone ID: LIB190-007-Q1-E1-B5
caaaaaaaaaaaaaaaaaaaaaaaaaaaaaaaaaaaaaaaaaaaaaaaaaaaaaaaaaaaaaaaaaaggaaggccgcacaaaagggtggaagacttatttcgtcgtgcttgcgactgtcatttctcttcttgggtgtcccctttgtttcttttcttcgggg

SEQ ID NO: 319 - DNA, 394 bp, Cyanidium caldarium
  unsure at all n locations
  Clone ID: LIB190-007-Q1-E1-B6
agtatgtccagatacaagagtgttttctgtttttcacataaatacaaggaacacgaaacttatttctatcgggataccatggggaccacgttgtcctgttcctttggtgttcttcaagcacctatatgggacaagcgttagtgattaggaaaacactatagtttgtactatttacttgaccgatggtatctttggtaactttccagtcatctgcaaagagataagcttgtaaatacaacgaggatagaaacaaacaaataacttgtcctccacntagaagatatacaactccaagtagaacgagtgacacttgtacattctatttggatgggaactgaaattgttgcacacttgcgcaagagataggtaaacagtatataatanataccactac

SEQ ID NO: 320 - DNA, 413 bp, Cyanidium caldarium
  Clone ID: LIB190-007-Q1-E1-B7
acaaaatgttatttaaaggacggcaagacttggtctatcgaataccagaactccaactacaacattgaagtggaagtgacagacaagaagcaatcggtatatatatatcgttgtaatgacaccgtagtaaaggtaactggaaagtgcaactctatcaccattgatagttgcaacaaatgtggagttgtattcgaaagctctttgagtacttgcacagtggtgaattgtcgttcagttcagctccaggtggagaaacaagctccgagtgtgacgattgataaaaccgacggcgcaaatatctttataccatcaagtattgtttcggaaacacaagttgttacagcaaagtcttcatccgttaatgtaactgtcacgaatgatgaagaagatcctgttgaatttcctttgcctga

SEQ ID NO: 321 - DNA, 467 bp, Cyanidium caldarium
  Clone ID: LIB190-007-Q1-E1-B9
gggacggcccacgcgtccgcggacacgtggggttctagatcgcttgcgtccaaaatgggatcccgggcgttcaaaatcgaaaacaattcctgaagcattagactacagtgagaatcaaatatcggataataactgggaagaatattgaaagctggaattttctgctgattactacggttgggtcgactggagggattgatgactttttaaaaattcgacgatctgctggtgattggatgcaaacgcttccaaaatgggagtcaaaccccatctatcggtaacgtccaacgatgcaccgtaagaaacgaacaattgtaccaattccatataaccttcggctgctgcgatatgaagaggagttcgctggtcttcgtccttcaaacagacgagtgctggatttctctgtaaataataaccaacttgttgcctgtttcctgaataaatactgtccaaaataattgctcatc

SEQ ID NO: 322 - DNA, 403 bp, Cyanidium caldarium
  unsure at all n locations
  Clone ID: LIB190-007-Q1-E1-C1
cggacgcgtaggtggttgtgggaaacaacagctttgttggtgtaactggttgccaatgggtttccaanaagaaagaaacaanaaacttgggcaaaccaacggtttcaacgtttggaagcaacgtttggactcaaagccaagtccaaataaagaagatcttggaggccatcaaagacttggttaacgatgcaaactttgactgttcggctgaaggtttatctttgcaggcaatggactcatctcatgtctccttggtttcgatggttcttcacgctcaagggttcgaaatgttccgctgtcaacgagctgtttctctgggtatcaatctggcgtcgttaaccaaaatattaaagtgtgcaggaatgatgacagtataacgctaagagcagacgacaagggagat

SEQ ID NO: 323 - DNA, 402 bp, Cyanidium caldarium
  Clone ID: LIB190-007-Q1-E1-C10
cggtgcggatattccgggacgggccacgcgtccgaaacacaagacaacaatgtctcgtcccaagtgtttctttgatattgctatcggtggacaacctgcaggaaggattgtattcgagttgttctccgatgtcgttcctaaaaccgcggaaaatttccgtgccctgtgtaccggtgagaaagggtttgggtacaaagactccaagtttcataggatcattccccagttcatgtgccaaggtggagactttacacgcggcgatggaaccggtggcaagagtatttacggcaccaagtttgaggatgaaaacttcaagttgaagcattcggagccctttttattgtccatggccaatgcgggaccgaataccaacggaagtcagtttttcattacggtagtgaa

SEQ ID NO: 324 - DNA, 358 bp, Cyanidium caldarium
  unsure at all n locations
  Clone ID: LIB190-007-Q1-E1-C12
cccacacgtccggtttcgtcagtttctttgggagaacatcggacagattattcgtcctgaggagtgtgaaattttatcctatattcccgaataacaatttgaaccaaaaaatttcttgcgggctctgtgggtctttttgtactttttttatcanaaaaaatatganaaaagattctgttgtttgcgtgtacgctgtccacccgtcttgcggacgattcggagagcgtcaacagtatggatgaagaagactttggcaaagaaagttccggattggaagctccttttgctatgtttgagacagtcatctaaattgtttatggtgacttgtatatagtagtttgtgagttatcgtaacaca

SEQ ID NO: 325 - DNA, 402 bp, Cyanidium caldarium
  unsure at all n locations
  Clone ID: LIB190-007-Q1-E1-C2
cacacgcgtcagncacgcgtccgctaaactggttggtgggagaaatcgccaactttggtgccaagtacgaacgattccttggataacaacttgttggttgacttgggttaaatattagtatttacaagaatggctagtgtttcgggtcttcctcgaagaattataaaggttggtaaagtacagtggtgacttgagtattaagggcaacaacggtaggagacggaaaagttacttcaggatccagttcctggaattagtgctgttcctcacgaagacaatgctcgttatttcaatgtgattatccagggtcctgattcttccccttatgaaggaggaacattcaagttggagttatttcttcccgaagactatcccatggctcctcccaaaagtcgtttcttg

SEQ ID NO: 326 - DNA, 381 bp, Cyanidium caldarium
  Clone ID: LIB190-007-Q1-E1-C3
actatttctagttggtaataacaataagggaatttcaaagtaaggataaaatcaagtggaatggggtggtttaacgcctccaattcccaatccaatgggtggaatggctcccaagtttccaaaacttccccgtccaagaaaaattcaaccaattataaggtctggtagaaacaccagaaggagatccccaagttttcaccaattacgtgattgtaaaaggaaacttgtgtaacaaagagacagaagagttcctcaaagttatttgtcctcaagtacagattaccaaaggtgatatggacaacgtgagtatatgccacctacggaaaatgtcaagttggaaactttataaaaaggttcagtcagaatatccggaacgttgtg

SEQ ID NO: 327 - DNA, 420 bp, Cyanidium caldarium
  Clone ID: LIB190-007-Q1-E1-C5
agcttatcgttgttgtacgtcaccaactgtccatttttatcccaacacaaaagttttattacaccaaccctctttttgcgtggtatgtaaaacaccgcatttgccccatgagacaacggaaaccagcaccacatggtcgtttgtccatcgcttcacggtttgtggaacaacaagaaccatccaataagcacctaggacaagattttgccgttcaaacagacctattgcagtccgactcgagtgagaacttgaaagggtttattaaaacgagaggttgtttgactcctgatgtgccgtttgtattttggtggtccggagatatctattcgttgatagaagatgagcctagtagacacctttttgagtttgaaggattcaattatggacgaatgaaaagagtagatggtggttggagactac

SEQ ID NO: 328 - DNA, 387 bp, Cyanidium caldarium
  Clone ID: LIB190-007-Q1-E1-C7
aaaaaaaaaaaaaaaaaaaaaaaaaaaaaaaaaaaaaaaaaaaaaaaaaaaaaaaaaaaaaaaaaaaaaaaaaataaataaagaaaaaaaaaataaaagaaataaaaataaaaaaaagaataatgtaaaataaaaacaagaaagtaattaaaaaaaaaaaatgtaaatcacgtggcttttgcataatgtgtttaacgagttaaagaggaagcatggggatttaaaaatctttatccagttaccaccctttgctatttgatcttatgcttttcaaacgacgtatggctgaaccattatctgtgcaaaaagatttgccccatatggcataacgcgttttttgccaatcagagctagtgatagctggtcctcctcgatggctatctaaat

SEQ ID NO: 329 - DNA, 454 bp, Cyanidium caldarium
  unsure at all n locations
  Clone ID: LIB190-007-Q1-E1-C9
cccacacgtccgggtgtggttacaacgtcnccttgattcctcatcatgtcttcgtggtctttagaacaaagttggagttggctacttgacaacttttcagagtttcaattacatactcttggtacattcattatccatgaagtatgttattggggtagttatgtgccgtttctattgttggatgccattccgtactttcgaaggtggaaaatacaaagagacaaggttaatgatgcctccactcagtggaactgtattttaggagtattaagaaatcattttttgttagtgttgcctcttattattgtgacgcatcccttttttgcgtggatgggaacgcgagatgagttaccgctgccctctgtcggagagattgcttctcaagtgtttttattttttgtcatcgaagactttattttctattggggacatanagcgttgcatactccttatc

SEQ ID NO: 330 - DNA, 407 bp, Cyanidium caldarium
  Clone ID: LIB190-007-Q1-E1-D1
gcttaaggacggtgctagtgctgctctttggacttgccgcctatttctctatacagttgtgttagcattttcagcaacaataattggacttgatggaaggaaggcagataacatatggaacgatgccctatattatcatggaaaagtggtgaacttttgtgcatattcggcttcgtctgtttttgaaggtggcgaccatggcgcatgtaaatatgtgatggctttggcttctatcagcttgattttagttttctttctttggttggcctcctttgtcgacgcattgtatccaattcttacaaagttctggtttgtggagcttggtatcaacatattccttactatgtggtggttggttggtgcaattgtggtgactgcaaagcgaccttctagtgttgttatggatg

SEQ ID NO: 331 - DNA, 450 bp, Cyanidium caldarium
  unsure at all n locations
  Clone ID: LIB190-007-Q1-E1-D12
gtgttaaacccagtcaaggacttacaaacggccaaagcttatgcgagaagagtaaaagaagcagtggagaagagaactacggtcgaattgcccaaacaagatatttgtgtacgacgtagcgacgggaagaaacacggagtggtcgctacgagaggagaagatattgagtttgctcaagatacagcgtttacaaaggcaggtaccgtcggagtaaaagtttggctgagaaagaaaccgtactggagattgtagaaggaggaacagggagcagcggggcattcttagaaaagcgaggctttcgctgctaacttgctagtgcaaatcgtagttcaatgacttggtcaacagctcttccgcttgcttttgcaaataaagacacaagctccgctcctgtttgtgtaaaaaagaaaaganaaaaaagaggaaaaggatgaaaatgaagagatatct

SEQ ID NO: 332 - DNA, 420 bp, Cyanidium caldarium
  Clone ID: LIB190-007-Q1-E1-D2
tacggccgacattccgagtccaccacgcgtccgataaccctgatacaagtacttcgtttccttgatttcactcgtccatactggaatccaagtttggcatttgtgatgggatcggccctaattttatctttgcctgcgtttgcgtttttaagaaagagaaacaatcgacctcttttatcttcacattcctatattccttgtgttgcacaaatcgatataaaagtgattcttggcggtgttctgtttggtgctggttggggcttgggtggactttgccctggtccaactgctagttagtttctttagtcttccggaacagcgtgccaaccacatagttactggatccatgatattgggagcattgctgtatcagcaaatgactaatttgggagagaaatcccacggtgattccaaaggaga

SEQ ID NO: 333 - DNA, 406 bp, Cyanidium caldarium
  unsure at all n locations
  Clone ID: LIB190-007-Q1-E1-D3
cttattttggcttacttgaatgatggtacaattatgaccatctcaaaggacaaagtcaaaccatcacctcatccaaatcgttggaacttgggtgaagtgtttntccttgcaacggcacttggctggtggctcactgcagcaactctcatttactttacaactttgtacaagacatctttctggacagatacttttcctctgtacgcagattggaagaatcccaagttgctcgctataaggcctccatacttcacttatggtcctcaaaatagttttatgctaaagtctctcatctatctgcaagtatctatgattggacaagctcttatcttctgtacccgtgcatactggatgttctttatggatcgtcctggtatcttattgatgggtgcattttgtactgcac

SEQ ID NO: 334 - DNA, 410 bp, Cyanidium caldarium
  Clone ID: LIB190-007-Q1-E1-D4
aacacgctaccggctcctttaatttgcaaattgcagggaataattcaccgttgattattgcttaactttttggcggtaatttcaaggctcgcttcttcgttcggccggaaccaaaatattatattatatattttgaacaagggaaatacaaatcgaagattctaaaactctgttggacaactaatcgaaaagaactccaaagagcgacctcataaaaatgctataaagtttctagaaacaaccaaagaagaagctattttttttacgtttgcagaagtaaagaaacatgtgaacgctgttgcgcaaggtttgttagaacttggctttggtccaggaaagaagatcgcttgctgtcttccacttggaagcccagagtttgtgtttacttttcttggttcgctacaatcacg

SEQ ID NO: 335 - DNA, 430 bp, Cyanidium caldarium
  unsure at all n locations
  Clone ID: LIB190-007-Q1-E1-D5
accacgcgtccgcccacgcgtccgcgcttgtttttcgagtgcgtaccgtcgtccaagaaaagaaaccagagttggtatcgagtatgaataatagtttcagtggtggttgccactctatggttgtagggtttccagcgtttcaatgtactataccgttggggaagaaacctggtggttggtatagtactaggacgaacggttgttgttgcaagacgaggtggaacaagacagacactcggtggacaataatacacagtagaagaaaacccaatgcttggacccgttgttggaaagcgagttctacgacttccaaaaatgaagacgacaaaggggatgagaacaacanaggaaataacaatagtggaggaaaaggcggaggttttccgttttctatctttggcggcaattggtcaccacggaaaaacaaccc

SEQ ID NO: 336 - DNA, 411 bp, Cyanidium caldarium
  unsure at all n locations
  Clone ID: LIB190-007-Q1-E1-D6
gacatttgtgcagccttgtcgtctctttactggacgttggaatcctttgataaaggtatcatcttgctttaaaatatactagaatggtttcatattattgtctactatgttgggatgggggctcgctccaactcttgttgtgttgccacaaatctgtactttttgcgagcttctgcaagtcttccacaaaagtcaaaagcaataccttttctcgatcgtccgcctgctttggatggttccatggttggcgatgttggtttcgatcctttgaatatctcgtcctatttagacttgcgttggttacgagaatccgaactcaaacactgtcgcattgctatgttggctgttgtgggttggttcgtacaagaagtattccattttacanatcanatatatagcgcttctgatcct

SEQ ID NO: 337 - DNA, 375 bp, Cyanidium caldarium
  Clone ID: LIB190-007-Q1-E1-D7
accagacatcccgaggattacttccttgcaccctaaatattaccttaatatacggcctacaacacggagcagagttccaaagtgtgtagtgtcgacccacttgccaaacaccttgcaacagggatggtatcagggtgctcgtcaaaactctcgtccattgcacaatcggtttcagacctggataacggccttgacaactgaacgcacatttcatcgtacaggttctggtagtggttctgttggtggtggtatgggtggtggtactggtggtggatcaagtaatgcaagagggaatggacaacgtcgcgtgcatccccgcatgcctttctggctgcggtacaatccacggccataatcgcgtccttcactgaccac

SEQ ID NO: 338 - DNA, 302 bp, Cyanidium caldarium
  Clone ID: LIB190-007-Q1-E1-D8
aagaaactgcggacaaatatcaggaaacgtccttatccaaactacattccatggcagtatttcaagacatatccttgttggtatggatcaaactcgttcgagaaaacaaaactcgattgtctggtaaaagacaagcagagatacagcatatcttaccagatttttttgtataaacattctatagtaaatattgatacaaggggttgttatttgggttttgactggctgcggttccaaaatagggccacttgcttatcaatgcatataaccaaatgataaaaataaaagagagtttcatatac

SEQ ID NO: 339 - DNA, 490 bp, Cyanidium caldarium
  Clone ID: LIB190-007-Q1-E1-D9
cgggcggaaatccgggacggccacgcgtccgcccacacgtccgcccacgcgtccgcccacgcgtccgcccacgcgtccgcccacgcgtccgcgaatttgctcgagaactgtttgaaaaagcactacaagtagatcctcattcagcacctacatatcaagcatttggtttgttggaaagtcgtcaaggcaacaaagatcgagctaggcaattgttcaagcgtggactaggagtgaatcctcaacatagtcatttgctacatgcttgggcgcaattggaagagtcagcaggcaattttgagtttgctcggcaattatatgattggggcgtaaaatcggagtttcccaagtgtcaagtaactttgaaatcttggctaaaaatggaaataagtcttgggtatttcgatgagtctatgtcaaagttattaaatctccgttcaaccgccaaacaagttgttgaagagctgagaattatgcgcaagttacttgaaag

SEQ ID NO: 340 - DNA, 380 bp, Cyanidium caldarium
  Clone ID: LIB190-007-Q1-E1-E1
agcaagttggacataggaggactagttgacccgaacttccgaacgggtccttttgaacttgcgttgaaaaagataacagcgttctctttaacagcgcctcgtttagttgttttatcgagtgctgcagtaacaaggttagaatggaacgagaatcagcgcaagatatatgctggttcttttaatattcctattgtacagttgaatcctggaaatatcttaaatgaaaagaaaaagggtgaagatgctgtgcgttccagtggtataccgtattgtattattcgcgctactggactgaatgatgagcatccttgtggaagaatcgtatttcaacaaggagatactgcagttggtagaataaatagaaaagatgttgcagatac

SEQ ID NO: 341 - DNA, 391 bp, Cyanidium caldarium
  Clone ID: LIB190-007-Q1-E1-E10
gaaaaccaagtgaggaaaagaaggcaagtagagggcggcccgagaaaggagagggcgtaagacgtgatacagagtaggaagaaaagagaagagagctagaaaggaggtaaaagaagagtaaaaggactagaagaggtacggaattcacgaggaaggagcgtgaaggaaggaggaatcccaagtaatcgaggaagaaaaagcttcggtgaaagcgtgaacggattttgtacacactgcccgtcaagttctggaagtgtgctaggaataagcaggagaagtagaagagagtaggaaaagaagaaaggaagtgaagacgtaagacgtgatacagagtaggaagaaaagagaagagagctagaaaggaggtaaaagaagagtaaaaggactagaa

SEQ ID NO: 342 - DNA, 449 bp, Cyanidium caldarium
  Clone ID: LIB190-007-Q1-E1-E11
gggacggcccacgcgtccgcccacacgtctgcccacgcgtccgttcaacatcgtcgttgtggacatatcgtcgtcagagttatggtagtttcagagatagtagcggcaacgtttatttatgtctgtggtctccgcatggcttataggataattctcagaggtgaaaagaaattgcgcaactacttgcctttgcagaccaaaagtggcgcatactactcccttcagcgacgattcttgcgcagagttttcaaggccattcacattgccattcaatatacacaaaactggaaacggaatagagccgttactagtaattatccagactctcggaaataaacatgattatcacaacaccacggtcaagacggtggtagtttgtcgacgaagacttccactagtggatggaaaactagtcaaaatcacgttcggcgacggttacaggggggatt

SEQ ID NO: 343 - DNA, 376 bp, Cyanidium caldarium
  unsure at all n locations
  Clone ID: LIB190-007-Q1-E1-E12
gacgaataggaggaatgtggtttcgtcatttacttcctctagtaagccgctttcccatcaagggaggttacagacgcttgagttctactcaacaagaaacttctttacccgctaacagaaggaagttactgtatagaagtaaacaaacaggttttcttgaactcgatcttatcctgngaaactgggcggaagaaaatctttcaaaactttcagaaggggaaattcaagaatacgagaaactaatccatcgtgaagttccagacttgtactcttggctaagtggacagcaagagcctccagaagaacttgacggaaaaatttttcgtcgcatccgagattcagtgtggaaaggtacaatcaataagagtaaaactac

SEQ ID NO: 344 - DNA, 401 bp, Cyanidium caldarium
  Clone ID: LIB190-007-Q1-E1-E3
accacgcgtccgacacgcgtacgccacccgtccggaaggaatggcaacaacttcggtaaacaacagatatgaacattatggacaaggaccaaacctacttttcaaaattggatggcaacatggccaaaaactgggtaaatttgaacaaggactttcgaaccccataaccgttatcaaacggcaagatcgagttggcttgggagccgaacaaaagacagtctggagtgacttgtggtgggaaagatatctatcggaagcaatcaacaagaatctccaacgttttgaaagatccacgacggaaaaaggtgaagacattgcagaggaaagtactgtctcacgaaaagaacggaagaagaagaagaagaaaagtagttctcgttcgaagaaacgaaaagaaagag

SEQ ID NO: 345 - DNA, 401 bp, Cyanidium caldarium
  Clone ID: LIB190-007-Q1-E1-E5
atactacaatgggaaagttacaagtaggagacgaagcacctgactttgagttgaaagaccaagacggtaatatagttaaattgagcgagttcaaaggaaaatatcctgtagtcctattcttttatcccaaggacaagacgtatggctgcacacgtgaagcttgcagtttccgagataagatgtcggaatttaacgaacttaatgcgaaagttttcggtgtgagttcggacagtgtagagtctcacaagtcgtttgccgatgaacaaaagttgacgtttcccttattatctgatgaaggcggtaaagtacgcaagctatacggtgtaccaaagagcatgtttattatgcctggtcgctgcacttatgtcattggtccggatggtattgtacgacacatctac

SEQ ID NO: 346 - DNA, 420 bp, Cyanidium caldarium
  Clone ID: LIB190-007-Q1-E1-E6
gggaattggcgttagggtggcagtgaagcatgggatttgcagagttcgaacgctcttatgagaagtatacaggaggtgacccatcgagaatgaaagtgtccgtggagaaactagacgaagagcaggttccacttcatagaagagactattgtgcacatttgtatattcctttgcgccgttgtttgagagacaactattttttgccgtggtcttgtgaggaagagaaggaggcgtataaccggtgccaaagaaaagagagaagaagaagagaacgactctataagaaaatcaaggaagaggcctccaaagtatcggcgacggaagaacaagatgaataatatcgtgttggtgcgtcgtctttgtgttggaacaataataactcctcaaatagtaaacagcttgatttgagtttcaagttta

SEQ ID NO: 347 - DNA, 409 bp, Cyanidium caldarium
  Clone ID: LIB190-007-Q1-E1-E8
accacgcgtccgcaggtactcgatgagaaaggagacccaaattaaggtgagagaatggacgataaggaactaggcaaaaggatatggtatctgcggtagaacatatgaaagaagcagcaccgactgtttagcaaaaacacagcactctgcagaaaagagaaaatgtagagtatagagtgtgcggcctgccaaatattagagaagaaatcgatgaaagtgaaagcgagtaaaagatgaggtatagagaatggcggtcctaactgtaaggatccaaaggtagcgaagtaaatagacgtttgaaaggcgtccagtatgaaaggagaaacgagtgtagcactgtctagtcgtccaactcagcgaaacagcaataactgtgaaaatgcagtaaactagcagtatgactgaaaga

SEQ ID NO: 348 - DNA, 386 bp, Cyanidium caldarium
  unsure at all n locations
  Clone ID: LIB190-007-Q1-E1-F1
gagcaaccaagtttgtgaagcaagtgtggagttganatatttagaggcagtagagaatgtacaggaaatatacanaaatattccagagagtgatctattggagttgtatggtctatataaaagaataaaggatggagaagctcctttacagaatcctttctatttctatcaatggaaagaaactgccaagtggaagagttggaaggaggcaagtaataagtattcaaaagaggaagctatgaagaaatatattgcactgagtgaaaaatatcacaagaaagattccaatacaagttatactgggaaacagcctttaagtttcgagttgcctaacagtgaagaagagcaatcccagaaacctgttttggacctttgttattttactg

SEQ ID NO: 349 - DNA, 424 bp, Cyanidium caldarium
  Clone ID: LIB190-007-Q1-E1-F10
cccacacgtccgggtggtggcgacgttggtggctcctattgatagacagctgttatgtcctttaataaactgttgaaaacattggctgatagatatgcgtctcaagcagttccaacaaagactgtggaaggttgggaaacaaccgctgatttacgaaaaaagttgattgcgactcatattaacgctctccctgttcgtttccaacgcgcaagagaagagttgaaggattttgtacaaaagactcgtacgttggactttacgtatcttgatgcgtttcgttttggtttccgaagcttagagttggcggcatggtactggatcggaaagaccttggggaagagggaacttcccaactcgatatgaaatgtgtcttcggcaactcttcttttctcggaaatacaagcttttatgtgctcgtgttttt

SEQ ID NO: 350 - DNA, 304 bp, Cyanidium caldarium
  Clone ID: LIB190-007-Q1-E1-F11
catcgacaaagttgagaatgtcacaaggtgctgttggtggcttgggagtgaaacgattgcttcgcgagtatcgagagcttgaaaaggaacaacataaacctgatagttggtttagagcttatcctttacaggaagacctatttgagtggcactttactataaatggaccagaaggtactccgttcgatggtggtttttatcacggaaaaatactgttgccacctgaatatcccttcaagccacctgatatcgtcctgctaacaccgaatgggcgttttgaaacaggacaacgtatctgcctgag

SEQ ID NO: 351 - DNA, 376 bp, Cyanidium caldarium
  Clone ID: LIB190-007-Q1-E1-F12
gaagggaagtaaaaggtaagaaagaggaaaggtttacgagagaaggaagtagaaagaagagagtgtaaggcggcgtcataatagaaatccgaaaagagtaaaagaaaagagagagaagaaagaaaagaagagaaaagccgtactgaaaaccgacacaggtactcgaggagaaaggagacccaaattaaggtgagagaatggacgataaggaaacaggcaaaaggatatggtatctgcggtagaacatatgaaagaaacagcaccgactgtttagcaaaaacacagcactctgcagaaaagagaaaatgtaaagtaaagagtgtgcggcctgccaaatagtagagaagaaatcgatgaaagtgaaagcgagtaaaag

SEQ ID NO: 352 - DNA, 363 bp, Cyanidium caldarium
  Clone ID: LIB190-007-Q1-E1-F2
cccacgcgtccgaggacgcgtgggttgtttccctcttccctgtttgtcactgaagttccttcatacatccttcgaagcatatctaaatgctccgaggaaactccttcagaagaagtcgccttttctgaagacaaaacttcttcttcaccttgtacagaccctgctggtggattgtctgtttcaacaccctcaacgcttgtactctcgttcgttatttcaccgacctcctctgaagatgagccttggtcttcttgttgtgtctgattttctagtcttttacgaagactgcttaataaatcctcgtcacgaacaggagaatcatcgtctgattcaataaattcccgtttcaactgttctagcctt

SEQ ID NO: 353 - DNA, 386 bp, Cyanidium caldarium
  Clone ID: LIB190-007-Q1-E1-F4
actgcttcaggtgcaacttcaatttacccgttgcttcaaattaaaagaaactatactttaacagtgcaaaccataaagctggctaatctaacagacgtatacaacagcagtgtattgggctttacctttcttgcttccaatgacactgcttggaaacaatcaagagccaatgtcactggtgcacttagtgcagcaaaacaaaacgtaacaggagcaatagcgtttctagaacgcttgatagcagcaagcacagtgaataaaacggtggagtttagtaagctctctagtggtacgaaggaggttgtttcgctggcaggtttaccgcttaatttcacgaaaaattctactggagactttgtggaaggtgatccggtctctgctgctga

SEQ ID NO: 354 - DNA, 406 bp, Cyanidium caldarium
  Clone ID: LIB190-007-Q1-E1-F6
accacgcgtccgcccacgcgtccggttgcaaggcattggaaagaaccgtttgggtttggtttcaagtgcaaccaagctatataaaacagcttattctggctcatacagaagaaacttgcgcaactctcgtggttatctgtggattggtggtttgtttggactctcagctttggccacctggtactcgcaccaagtcaacgcagattcacaggccgtcaaggaaagtgttcaaaaactaaatcctgaagatttcgtgcctctccagctgatctcaaatactccttataatcacaacgttgcaaggttgcgttttgctattcaatcttcagaaagtgaagactttcctgcagtcagcctcgtccaagtaaagacaaaagatgagcaaggaaacgatgtgattcgtcct

SEQ ID NO: 355 - DNA, 412 bp, Cyanidium caldarium
  Clone ID: LIB190-007-Q1-E1-F7
acaaatttgaaacgcgtgtttggttttttactttgtacttgattcttgtaaaacatgtctgacgatattgttgccttggttattgacaatggctctggtatggtgaaagcaggagttgcaggggacgatgctcctcgttccgtcttcccttccatcgtaggtcgaccaagacaccaagctattatggttggtatgggacaaaaggaaagttatgtgggtgatgaggctcagtctcgaaggggtatactctctttaaaatacccaatagaacacggtattgtcactaattgggatgatatggaaaagatatggcaccatactttctacaatgaacttcgaattgcacctgaagagcatccagtcttgttgaccgaagctcctctcaatccaaaggcaaacagggaaaaaatga

SEQ ID NO: 356 - DNA, 360 bp, Cyanidium caldarium
  Clone ID: LIB190-007-Q1-E1-F8
accacgcgtccggcccaattccccaacgctttggagtgtcgttgtgttgttgttggtgaggtgggaagcaagaagagatgagtagaggaagtagtgccggttatgatcgacatattactattttctctccagagggacgactatatcaagtagaatatgcctttaaggctgtaaagtcagtaggaattaccaccgttgctgtaaaggggctggatgcagtttgtggagtaactcaaaagaaggttccagataagctcattgaccctaaatcagtcaccaatgttttccgaatatcggatcaccacggctgtattttcactggacttgcaacggacgcaagggcacaactacaacgaacac

SEQ ID NO: 357 - DNA, 365 bp, Cyanidium caldarium
  Clone ID: LIB190-007-Q1-E1-G11
ggcagaaaacgccatgaattggagcacctcatttcggctcagaacaatgtgaaagccaatatggagcagttgaggaaatatatcgatatccatcatggaggttactggaaacgtttagaaagcctcaaccaagaattaaatgaacatattaatgaaatagaggaattgagtgttctaaagcattgctatgaacttgcagaaaagagagaaacggttgcaatgcaacagagattgtcatccaaggagcgcctcaccaacgagttgaagcagcgagaactagagttgcagaaacagtatggggaacttttaatagagcgagatagacttttgtcaagaaagctttaacacacaaaacatctacgtat

SEQ ID NO: 358 - DNA, 338 bp, Cyanidium caldarium
  Clone ID: LIB190-007-Q1-E1-G12
gcggagaaacgaggtggagctcggggccctgagaacgtttggggtgctgcaagttccggtgcagtttgtgcaattttgtatggtgttttatctccttatggagttgcaaaactgtcgttgttgcaattggcctttgtagcgtcactcagtagtaaactggccgatacagtttcaagtgaaataggaaaggcatatgggaagcgtacttttttggtaactaattggaaacccgtaccagctggaacagacggtgaagtcaccctggaaggtacccttcccggattattggaaaaacggaaatgtcctattgggcctgggttggccggtggaaaaatttt

SEQ ID NO: 359 - DNA, 250 bp, Cyanidium caldarium
  Clone ID: LIB190-007-Q1-E1-G4
cccaggcgtccgaccacgcgtacgcccacgcgtccgcgggaattatgttgtcggaaacttttgtgaacctgattgcttggtatgataatgagtggggctactccaatcgtgttgtagatttggtgcaccatatggcgaaagttgatggtgtagcttaactctgcttttcttgttgttttttcgtgtattgtttgttttgtgaaagagatgaaatgtgttgtcttttccataaaaagttgtgtgcgctgtg

SEQ ID NO: 360 - DNA, 386 bp, Cyanidium caldarium
  Clone ID: LIB190-007-Q1-E1-G5
aagaaagtgtactacagatcacatttcgatggcaggaccttggctcaagtatcgaggtcacctggataatatttccaacaacatgttcatcggtgctatcaatgcggaaaatggcaaggccaattatgtgaagaatcaattgactggtcaatatggtccggttcctgatactgctcgtgcatacaaagctgctggattgccatggattgttattggagatgaaaattatggagaaggttctagtcgagaacatgcagcactggaacctcgtcatttgggaggtgttgctattttggttcgttcttttgcaagaatccatgagaccaacctcaagaagcagggccttcttcctctgacatttgcggatccggcggattatgatcgta

SEQ ID NO: 361 - DNA, 400 bp, Cyanidium caldarium
  Clone ID: LIB190-007-Q1-E1-G6
atcttccttatattctttgtgcttggacaatggttgcaaagactgctctgagttgcctctttctctctttccttatcgctgccgcagttgcagccgacgtagtttcagaggagagatggggatatgctcagcaaacccaacaacagcaacagtgccaacaagtatgtaaacagtatgcatactatcagagtccagtctgcacttccgtaaccacacagagcccatactggacccaatgctcgaagactgtgcaaacctttgtcccaagccagtgcagtacttatacccaatctcctacatggacctattgcagcacctacaccaccactagcgtaccatctcaatgcagcaaggccgtgactacctatactcaaacctgctgtgcttatgcccaacaaac

SEQ ID NO: 362 - DNA, 395 bp, Cyanidium caldarium
  Clone ID: LIB190-007-Q1-E1-G9
cggtccggatatccgggacggcccacgcgtccgctccgaacttcgtttcttctcgcctggttttcttcttctgggcgattcttttccttacgagatcgatcatgtcacaacaacataaagttgctcctccaacaggtttagaggaaacagactcggtaacactgacacgttttgtcttacatgaacaacgcaaacacccagagtcccaaggagacttgaccttgttgttgacttccgttcaactggcgtgcaaagtgaccgactcttgtgtgagaaaggcaggtattgccaaactatatggactagctggaggaggtaatgtttctggggatttacaacaaaagttggacgtcatttccaacgaaaccttcaaggtaaacatcgaaagtagtcaa

SEQ ID NO: 363 - DNA, 369 bp, Cyanidium caldarium
  Clone ID: LIB190-007-Q1-E1-H1
cccacgcgtccgcggacgcgtggggggtattgcgactcatggccatgctgttggtaatgtgtgtctatagaagaaatttggatttgggcaattcgatgcgccaagatgatgtaatgacgtgaacaaggtgcttgtgaacaacttggtcactatgattttgttgttctcttcaaagtcaaggagtttttagtaaacatattcgttcccttagctttacaattcatggacacctgttgccacagttctttgtctgcaactctcttggagggtttccccgagtcgttaccaccaaagtttttggtggagcacctcgaccagttgcttgttgtggacctgcgttgctctcaactgtacagtttgggacacatt

SEQ ID NO: 364 - DNA, 453 bp, Cyanidium caldarium
  Clone ID: LIB190-007-Q1-E1-H10
cggacacgtgggtgcgatgcggtggaccttgcaatcgtatcttctcgttgctttgactgccaccgttgccgctggttttacaactttagttacgagatacaagcatgtatttagtatgttgagagctagatggtttagggacgtgtttgaagatttgcgcttaagacttcgagcaagtgaagccgccgccataagggagagattggacttgctagaagctaaaatattgtcttcaagcaacagcagtagactttctgttcattcgcctcgtacacttgcagaagagaaacctattcctgagtgggatctagttaccagagaagatttcgttactcttcgaacgagagtagatgatctgtccaaagagttgactagtatcaagtcccaagctgacaagtctctccaagtatcggaagatatgttgcgtcaatacttacaaaacgcagtttcgac

SEQ ID NO: 365 - DNA, 393 bp, Cyanidium caldarium
  unsure at all n locations
  Clone ID: LIB190-007-Q1-E1-H11
cccacacgtccgcaagaaggtgttgcacggctgtcgaaagaacgtgctgtgaagtgagagaacgtacgagaaagccaagtgaggaaaagaaggcaagtagagggcggcccgagaaaggagagggcgtaagacgtgatacagagtaggaagaaaagagaagagagctagaaaggaggtaaaagaagagtaaaaggactagaagaggtacggaattcacgaggaaggagcgtgaaggaaggaggaatcccaagtaatcgaggaagaaaaagcttcggtgaaagcgtgaacggattttgtacacactgcccgtcaagttctggaagtgtgctangaataagcaagagaagtagaagagagtangaaaagaagaaaggaagtgaagacgtaagacgt

SEQ ID NO: 366 - DNA, 360 bp, Cyanidium caldarium
  Clone ID: LIB190-007-Q1-E1-H2
accacgcgtccgaagaagagtaaaaggactagaagaggtacggaattcacgaggaaggagcgtgaaggaaggaggaatcccaagtaatcgaggaagaaaaagcttcggtgaaagcgtgaacggattttgtacacactgcccgtcaagttctggaagtgtgctaggaataagctatataagtagcgtatgcaggaaagaagaaggtaaaggaagagaaggaagaagcagagagggactatgagcgagaaggtggatagtcgagagggaaaaagcccagaagccaagataaggtatcaaagtaaagaaagaaggaaaaggagaagaagagagggtaggcttagaagcagcaaaccagagagg

SEQ ID NO: 367 - DNA, 400 bp, Cyanidium caldarium
  Clone ID: LIB190-007-Q1-E1-H3
gtggtagtttccgaaagacttgcggaatctccatgtatccttgttactggtgagtttggttggtcggccaacatggaacgtatcatgaaggcacaagctttgcgtgattcgtccttggcaatgtacatgtcatcgagaaagataatggaaattaatcccaacaatgccatcatgcaagaattgcgtcgccgtgtggaagcagacaagtcagacaagaccgtgaaagacttggtcaatttattatttgacactgcattgttgacttccggattctctcttgacgatcccaacgtttttgcctctcgtattcatcgcatgattaagttaggtcttagcattgacgaagatgaagtcacagaaaagatggaggaagaattaccccctctcgagaccgaacaag

SEQ ID NO: 368 - DNA, 405 bp, Cyanidium caldarium
  Clone ID: LIB190-007-Q1-E1-H4
ccgaacacgcttacggccatggaacaagaacgattagaacattatccactggtggaattatgtgaaagtgactattggttggcatacaatataatatttgtggttactaagttgcaaaacacaataccaaaaaggatgcttggattgtgttggacggaaaaatatatgacgtgactcgttttctggacgaacatccgggtggagaagaagttctacttgaagttgccggtatgtgttatttcgaggaaagatattcctatttcgcgcaaaatatcataataataataaccatatgttagggcgtgatgctacgagagagtttgaagacgttggtcactcggatgaggcaagagaactacgaaacaagtatttcgtgggagtagttcgtagtgaaacgaaagaaga

SEQ ID NO: 369 - DNA, 398 bp, Cyanidium caldarium
  Clone ID: LIB190-007-Q1-E1-H6
agaaacgacacttttgcctttaaatagaatactcttctacgacaactttttcgtattcttgtttgcaaagctcttccttatattctttgtgcttggacaatggttgcaaagactgctctgagttgcctctttctctctttccttatcgctgccgcagttgcagccgacgtagtttcagaggagagatggggatatgctcagcaaacccaacaacagcaacagtgccaacaagtatgtaaacagtatgcatactatcagagtccagtctgcacttccgtaaccacacagagcccatactggacccaatgctcgaagactgtgcaaacctttgtcccaagccagtgcagtacttatacccaatctcctacatggacctattgcagcacctacaccaccac

SEQ ID NO: 370 - DNA, 387 bp, Cyanidium caldarium
  Clone ID: LIB190-007-Q1-E1-H7
agcaagtggaagtggcgtgtgactgttattggttggagcgccaaactttgtttcctttacttttcatgtccacgaaacaacaaagtcaagcagccttgcttctaatgaaacagctcaaagagctaaacaagaaccccgactgtgggttttcggcaggtcttgtagatgaaaccaatccttttgagtggcaagttattttaagtggtccaccagacaccttatatgagggaggcgtgttcaaggcacgtctggtgtttcctcaagattatcccgtcatgcctccgacgatgaggttcacttcggaaatgtggcacccaaatgtctatcaagacggaagagtttgtatatctatcttgcatccaccgggagacgacccgcacaactatg

SEQ ID NO: 371 - DNA, 393 bp, Cyanidium caldarium
  unsure at all n locations
  Clone ID: LIB190-008-Q1-E1-A1
gcgcagcaatatcgggcttacttttaaaggacgcttgtactattcatactggtgaatatataagaggtttatttcagttatgcatgcaattaggaagagtagaatggagaccagaaattgtacgacacgtagaagatttgaaacagaccaatgagtttcaagatattgtgttttgtactggagctgatattaactttatcggtgggatatctggacacgtatcgataactcgttcgtttggtagaaacttttattatcatcagggcgaaacaaatctaccgttaaaggtgcccatcatatgtggaaggtatctcaccgataaagttaatatcagctacatacaanaaaaaaaaaaaggggagagtggaggaagaagaaaaaaaaaaggggggg

SEQ ID NO: 372 - DNA, 295 bp, Cyanidium caldarium
  Clone ID: LIB190-008-Q1-E1-A10
cggacacgtggggtttgctaggaagaaggaagaaaagcaatattcttgaaaaactcaagtgggaagctcgccaccaactactttattcacgggtagctgctgctgctcgttacaaaaataaagtatcctagtgctcgacgggataagctttgagtaaaaaaaaaaaaaaaaaaaaaataaaaaaaaaaaaaaaaaaaaaaaaaaaaaaaaaaaaaaaaaaaaaaaaacaaaaaaaaaaaaaagaaaaaaatggaacaagacctaaaaaaatggggcagcaagtccaggggtttaa

SEQ ID NO: 373 - DNA, 400 bp, Cyanidium caldarium
  Clone ID: LIB190-008-Q1-E1-A11
aaaaagacaaaaatacgatcgatgcagatgaaaagaagagaaatccaaagttgactttttctacaatagtcaacgacgcattgtaagaaattctctttcgcattcacaatccaacacttttttgatccttttcgtacattttggattgtggcacacaacatgaaaattcctgtccgactcgtcaagttttctttggaaaaaaagaagccaacttgtttcaacagaagtataagtggaatcgcctacactttttctcgccatggacaggtttctgatgtcttgaaaaaggagactcaaagctatgatgagaagaaacttggtccttcgcaagtactcgtgtcgtttcttgcctcaagtataggcacaacagatttggcgtggataagaggtatgggaaaga

SEQ ID NO: 374 - DNA, 419 bp, Cyanidium caldarium
  Clone ID: LIB190-008-Q1-E1-A12
gaggaaaacatggcgacatttacggcacgcctcaagcagctctggaatcatccagcgggacctaaaacagtgtttttttgggctcctaccatgaaatgggctttggtggttgcaggcctgtccgatatgaagcgcccccctgagaaactttccgtacctcaaaacctagctttggcttgtactggagttatctgggttcgatatagttttgtaataacaccagtaaactataacttggcactggtcaatacctttgttggtgctaccggtatttatcagatttggagaaaagtgaaccacacctatttccaaacaaaaacaagtttctgctaattgattcgctatgagacgtgatggagtgagatatcgaacaacttttggtgtgtgaaatccagtgaaaatgaaagatttggtgtttt

SEQ ID NO: 375 - DNA, 392 bp, Cyanidium caldarium
  Clone ID: LIB190-008-Q1-E1-A3
gtcgaccgacccgtccgatttgcaactggtagaaaatggaatgtgcaacttaagaagacatattgccaatacgagagcttttggtatacctgtggtggtagctttgaacaagttccagtacgatacagacgcagaattacagctcgtaataaagagatgtaaggaagcaggtgcctttgatgcagttttggccgatcattgggcacaaggtggtcagggtgctatagagttgggacaagctgtcattcgtgcttgccaagcagccaaaactccattgcgttttagttatgcattggacgattctctcatagacaaagtgaaggccattgcgaaaaatgtttacaaagcaaaggatgtggaattctccgaagatgcaaagaggaaaatagaaa

SEQ ID NO: 376 - DNA, 379 bp, Cyanidium caldarium
  Clone ID: LIB190-008-Q1-E1-A5
catgattctatgcagcgtcgaaaatggttgctgagcattctatattcataccagtccaagttccgccatacttttcgttcgttgtgtatggggacacagtcttctgaaagttgtttgggcagtttacctctctcctatattgagataccagaaaagtgcgcaacttcgcaacggaagccgcctgttatactccttcacggagtcttggcctctggagctacttactcttcattgcttgccagagacgattttgttcccgaccggagaaaatatgctttggattcccggaaccacggttccagtccacactctccacatatgaactatggagtcctagcagaagatgtaaagcgttttttgaaaaattacaacatttccg

SEQ ID NO: 377 - DNA, 363 bp, Cyanidium caldarium
  Clone ID: LIB190-008-Q1-E1-A6
cccacgcgtccggtcagttggaaagcctcgtagagaagaattattatttgcataagagtgctaaggaagcttatcgttcctatttattggcatacgcttctcagcatatgaagcatatctttaatatggaatctttggatttgaaagcagttgcgaaaaattttggtttaagagttccaccagcagtaaatctgcaacagcatcaatgaaaaacgtcctcagtcgaatcgaaaactgcaaaagaaggttgccaagacagatcgtttgaaggctattttggagataaagttggcgtcatccaaactttatagcaagtcatagtcgtccagttgatcgttatataaaagaacctttctctttgag

SEQ ID NO: 378 - DNA, 365 bp, Cyanidium caldarium
  Clone ID: LIB190-008-Q1-E1-A7
cccacgcgtccgcccacgcgtccgcgacactacattgttgtggagaaagttgtgtttagcgcacccgacgactcgggatttgcagtgggtcaggctcggtttctggataacaacgatgaaatgcaacatccatcgccatcccaggatggctcatcgttgcaaaacgaaacagagaaaataacgattgttggaaagcttggtaaaatagaagaaggattgcatttggctgtggaaggagtatgggtaaaccatagcaagtatggtaaacagtttcaggtgcaggtggcacagacagaaccttttagccatgaagattattgatagacccatagtttctgtgtaaagtgagatgatagaataaaaca

SEQ ID NO: 379 - DNA, 360 bp, Cyanidium caldarium
  Clone ID: LIB190-008-Q1-E1-A8
aaaccaaaagcgactttgcgtttgaccgcaagtttttgaccaacgaaaagataacggaactagcagctgccgactatttggaaagttgtgtggacagagactttcagtatacttttgattggacgagtatccatgaggcttatactcttttaagttcactagcgtttctcgtcgtttttcagacgtttacagctttcgtggataattttattcaacaacaggaacgaaaggaggtacaggaagagatggaacgattcggtcgctttttatcaccaaaaacagaatatagagacgatgtgagtttggataaagtggatgtgaatatgtggaaagcacagcaaccagagcgttggttttttg

SEQ ID NO: 380 - DNA, 345 bp, Cyanidium caldarium
  Clone ID: LIB190-008-Q1-E1-A9
cccacacgtccggcattccgctggagccctcgcattggagaaatggaaagactatcgcccgtgtattcgaccaccaagtcgtccattgtgtaagtagagcactggaagaaccgtttgaaagaactggatcccgtgcttgatgcagtcgaaccaagttagaagtcctcacgggaacaagtttccaagtggttacaccagcacatgaaggatattagtggagaacatgaacaaatcgttgtccaagaagacactcgttaagacgtggttcatgcatgagcgagtgcagcacacgactttgacgtcagataggtggacagtcacagtcaacggatgagaatctctcga

SEQ ID NO: 381 - DNA, 424 bp, Cyanidium caldarium
  Clone ID: LIB190-008-Q1-E1-B10
ctgcggctacaagtccggaaatcgcgggatcgacgatgacatttctcaccaaaaaagatgtggaacattgtttcgatgtgatatggtttagcatatttgatatccaatattcttgtttatgttctttgaatgccttgaaccagatgtgtcgaacctacagcgtgtctgtgccggctggcgatgactttgaatttccaaactctccttgcttaagtgactgggatctcgttcattttgtttcccatagcaacgaacctgtatttcgtgtatttcacaagtgcatcatgtgctgctttttagaacaaagaatagttgtctttcgggatggcctttgtatactgaaaaattccaacagctggttgttgttggatgctttgcgtgaaatcacaaaacatgaaaaggacaaagaaaacccgttcctcca

SEQ ID NO: 382 - DNA, 456 bp, Cyanidium caldarium
  Clone ID: LIB190-008-Q1-E1-B11
gaacaaaatgaagactctgtaaaaacagaggactctgccaaggaacaagaactactgaaacgttgcaaggaggctgagagtttggcagatagtcgtttgaaagaactccaagaaaccctggaagaccaaaaaagacttgcggtagagttggaacggttaaagagcgagcggttagctataaaaaaggacgatatcacgcaaagtgctatttattgttcattggaagctgcttttcaaaaactacagctacaacagatagaatgggaacgagaacgaggcaacttgaagaaagagaaagatgaattggaaagaataatggaagagaaatacggcttgcagattcaaagactaaaaagaaaagcttcggagtggaaacaacagttggaagatgccattcatactagtaatgaagccaaaagccaaagagaccaagcgcttatgcgttatgaggcgaaa

SEQ ID NO: 383 - DNA, 422 bp, Cyanidium caldarium
  Clone ID: LIB190-008-Q1-E1-B12
cccacgcgtccgcccacgcgtccgcccacgcgtccggaagaaagaggcaaatacgggaaagcagtaaaagaagaaagagaaaggaaaaaactggagtagcgaaacaagagaagggaagtaaaaggtaagaaagaggaaaggtttacgagagaaggaagtagaaagaagagagtgtaaggcggcgtcataatagaaatccgaaaggagtagaagaaaagagagagaagaaagaaaagaagagaaaagccgtactgaagaccgacacaggtactcgaggagaaaggagacccaaattaaggtgagagaatggacgataaggaactaggcaaaaggatatggtatctgcggtagaacatatgaaagaaacagcaccgactgtttagcaaaaacacagcactctgcaaaaaagagaaaatgttaag

SEQ ID NO: 384 - DNA, 261 bp, Cyanidium caldarium
  Clone ID: LIB190-008-Q1-E1-B2
gtcgctcagcacatggaaaacgacttgggcatttcctcttggtgaattgcacaataatacatcgttcactaatgcaagctatttcgttcactccgtagtcgggatccatgaagaaagactgcaaggaagacacaaagaaacacaaatttatttcactgaatcacaatggaagaaactcctgctactggaagctcgagagttatttttccattttcaactagaaaagttccgactttcttaaagtaaagtcccttccaggga

SEQ ID NO: 385 - DNA, 350 bp, Cyanidium caldarium
  Clone ID: LIB190-008-Q1-E1-B4
cccacgcgtccgctactcttgaaggatgtaccgtcagtgcttgaagagagttttcaagagtcgtttcatggcttcagaagcggggaaatattggaaaggaagcacaaggtctttttccagttcagctgggacccagaggaatgattggaggtcttctgtaaagaagttatctgttgctgccagcgtaggtgctgctgtggctgccttttatggaattgaaagacataggacagcccctatttcttgcaaggaggcataaactattgcaaatggttccgtgaattatgacaaggtcagagaagcaattgtaaagatcattgtgcaggatgataagattgctcccaccatgt

SEQ ID NO: 386 - DNA, 394 bp, Cyanidium caldarium
  Clone ID: LIB190-008-Q1-E1-B5
gagaacgtacgagaaagccaagtgaggaaaagaaggcaagtagagggcggcccgagaaaggagagggcgtaagacgtgatacagagtaggaagaaaagagaagagagctagaaaggaggtaaaagaagagtaaaaggactagaagaggtacggaattcacgaggaaggagcgtgaaggaaggaggaatcccaagtaatcgaggaagaaaaagcttcggtgaaagcgtgaacggattttgtacacactgcccgtcaagttctggaagtgtgctaggaataagcagtcgagtagtagagtaagtgtaaaagggaaaggaaaggagagaaagaggaaagggatgaaatgcagagatctctagagaaaggcaagaaagaaaagaaagggagacccagt

SEQ ID NO: 387 - DNA, 379 bp, Cyanidium caldarium
  Clone ID: LIB190-008-Q1-E1-B6
cggaaagcgacaagtcagtgcttgttgtcttctcaggtccatctggagctgggaaaagtagtatcatacaaaagctgaacaaagattaccctgatcgaataggatttagcgtaagtcacacaacaagaccaccgcgaccgggggaacaaaacggagtagaatactattttgtttccgaggaaaaatttaaaaaaatgatagagaatagtgaatttatagaatatgcgaatgttcatggaaattattacggaacaagttttcaagcagtagagagtgttctcaatagaggaaggctgtgtgtgctggacgtagacgttcaaggatgccgttccattcgtcggagaaacatgaaagctataataatatttgtttcgcctcc

SEQ ID NO: 388 - DNA, 224 bp, Cyanidium caldarium
  Clone ID: LIB190-008-Q1-E1-B7
aaaaaaaaaaaaaaaaaaaaaatagaaaaaaaacaaaagaaaaaaagaaaaaagaaaaaaataaaaagaaagaaaaacataaagaataattacacaagttcacataagatttaaaggtaggtctcggcgggagtctaacgggattgcaggtttaagtccgtctttaaaactcttctgtttcggcaaaactcttacgtaacttgatttaaaggcctggcttttta

SEQ ID NO: 389 - DNA, 361 bp, Cyanidium caldarium
  Clone ID: LIB190-008-Q1-E1-B9
aaaaaggaacggcaagacggagttggatatccattcatctacatatatatatatatatagatatatatatacatgtatagatgtgtgttggaatataccaatatattttacaacgaaaatagagaaaccccaagtttggtgaatacaaaaaagaaataaaaacaggaaacagaaaaagaagaaaaacaaggtggaactgacaaaaggtccaaacaatagaagtcatcaatggggaaaattgggcaatgtacagggaaatctaacccaatattgatgagtgtcgtaaaaaaaaatcgaagtaggaagaaggacataatggaacttatggcacacccaggtgccaacaccacctgtaaaacgt

SEQ ID NO: 390 - DNA, 383 bp, Cyanidium caldarium
  Clone ID: LIB190-008-Q1-E1-C1
gacgacgcgtccgctcaaaaagtactgtttatttactagacagaagctgatacagctgctgtcgtacacaaacaacacaagcaaacagttggaagccgactgtgaaaccaacccacatttccagactcccaacagaactgcttctcagttagttacgcaatatgcctagtcataaggaacacaataaaggaattaaaatatcagctgacggttacgcactaaagttgagcggtattcggttggacgtagacggcagtttggtcactatggtggacgcagacgacctcagagccctcatgtttaaggaaagcctcaaggaaaagtcaaagctgcatgacccaaaatttttcaaaagctattatgaggagaataaggactacttt

SEQ ID NO: 391 - DNA, 408 bp, Cyanidium caldarium
  Clone ID: LIB190-008-Q1-E1-C10
gactcactcattttctctttgttttgtcttttgtagctgttttcctcgtagctcatgcagttcccgttggagaagatgcattcagtttcagtcagacttttggaaatgcttctgcttcaggcaacgcctctgttattccagctacaaccaagatccccaagttagaagtaactagtagtgcctcatcaaaggacaatggaaaagcagctcaagtagactttgcagattactcaaagggatatccttcgcctagctatttttacgctccttcttacacatcctatgtggaatttcctcaatatccatcctatccatcatggccttcttttaatgagcagcctgcctttggtggcttcgatcccaatgcagagtttggagagtctgaaattttcgtgtgatggaaacaaa

SEQ ID NO: 392 - DNA, 453 bp, Cyanidium caldarium
  Clone ID: LIB190-008-Q1-E1-C11
atggcggaccatgatcaagtggtagcgtacaagcgttcagaagaagaaaaatggagccaagcaggtgaaaaaagatggcagttattcaaaagactggaaaaagagaatgctactgcccgctttttcttacaaaacaaagctatttttccaggtgctagagttttggaactggcttgtggttccggagaaaccactttgcaagtagctgcgaaagtaagaggttattctgtaccttcaggagagaccacgggggaagtggtggataaattgttggatgtattacgtccatcttatcaccaggaagggaaactggatggtaccagcaatagtggttcggtagtaggtgtagatatcgccaaaggaatgctgaatgtgttcagaagcatgttggaaaatactgttttgaaagatcacgtgcaacttgtagaaagtgacgtggaagcttatgaaatg

SEQ ID NO: 393 - DNA, 389 bp, Cyanidium caldarium
  Clone ID: LIB190-008-Q1-E1-C12
atttgaaagactacgaagtttggtgtttttttcagggaggttctgcctactagtccgctttacagcgcgttgaaaccctcagaggactcagtgaggcgtgaaagacttaacctgcaaacatttttaaccagctgggttttattgaagagaacaacagaggtctcttgcagttgaatttggaaagtggtgcttttaactcttcttgtcgccaaaattttcgaaactattacgagtaactttaaagttagctccatagatgttccaacagccgcgtcccacaaatatgtatcgttctataagaaacccctagtccgaatgcctgtaggaggttgtacttgtacaaggagagaaaataagtgctttttgaattctagtcagaaagcaaacac

SEQ ID NO: 394 - DNA, 392 bp, Cyanidium caldarium
  Clone ID: LIB190-008-Q1-E1-C2
ggtttcaacaggacgatgcacatatattttgtatgccttcccaggtggaaagtgaagtgaaaaatatgttggaatttctgaaagatgtatacgacctttttgggtttacatttgagttggtgctttctacgaaacgtgaaaaatttatcggtgagattgatttatggaacatagcgggagaggagttgagaagagctttacaggatttcacgggaaaatcttgcaatgaaaaatactgttggacactgaatcctgaagacggtgctttttacggcccaaagattgatgtgaaaatccacgattccttacagaggaaacatcagaacgcaacgattcagctggactttcaacgtcccattcgctttgatttggtgtaacacgcacctagtcct

SEQ ID NO: 395 - DNA, 367 bp, Cyanidium caldarium
  Clone ID: LIB190-008-Q1-E1-C3
agcagttcaaggcccgtttgatgaagcacctaccgtattcgacgtttcacgcggaagagagttttatggaccaggaggcccttatcatgtatttgctggaaagaatgctagtcgcggtttggcgaagacttcaacagacccagatgatgttgaaggacctttggatgacctttctgagagtcaaaaggatgcactaagccagtggtatttgcgctttatggaaaaatattagaacataggacacttgaaagtagaagatgtagccaatgtgaaaaagtccgattagtatgcgtggcaaaaaaaatttttcttatttgtgttgcttttagtgcctcgttgaataataaaccacagaggctgtcaatgg

SEQ ID NO: 396 - DNA, 383 bp, Cyanidium caldarium
  Clone ID: LIB190-008-Q1-E1-C5
gatttgtgatccaatggatttggacaggaagcctcttgtgcggttagcaacagaggaaacctgttcgcgatatctttttattgttaacgttggaagtaaatgtacagtcactagtagaaacaagtatgtatcgtggaattcgagaaaggataggacgcttgagcagagacccttacgacctggtaaaaaggggaaacaaaagctgccaatttatttgcttgctgcccagaactgtaaggatcacttaaatacagtatataaaggtaccagggagaatggaggcggacaagtgtccaaaaactcttgtcgacaaattcttacccttgcttccttttttgcaatgtttcttgcaaaacctttcaatactggtgctgaaatgaatg

SEQ ID NO: 397 - DNA, 364 bp, Cyanidium caldarium
  Clone ID: LIB190-008-Q1-E1-C7
gatcaacaaccaacgaaagcaagcgagctactatttggcgtgtcatcatgagcgagttggttcgacctggtcgtttctttgatagcagctttggagacttgttttcatgggcaaccgaccctttttatcgagatatctggtctatcacaccacgtagttttgaaggtcaaacatggtcgcctaggatagaccttgtagagaaagacgactgtttcttggtgaaagcggaagtacctggagtaccacgggaaaagatcaatgtagatttgaaaggtgatattctaacgataactggggagaaggaagacgagaaaaagtcggatgaagaacgggaaggtaccgtgtatcatagagtggaacgctc

SEQ ID NO: 398 - DNA, 455 bp, Cyanidium caldarium
  unsure at all n locations
  Clone ID: LIB190-008-Q1-E1-C9
gaatgctgggtggagtagcgaaacaagagaagggaagtaaaaggtaagaaagaggaaaggtttacgagagaaggaagtagaaagaagagagtgtaaggcggcgtcataatagaaatccgaaaggagtagaagaaaagagagagaagaaagaaaagaagagaaaagccgtactgaagaccgacacaggtactcgaggagaaaggagacccaaattaaggtgagagaatggacgataaggaactaggcaaaaggatatggtatctgcggtagaacatatgaaagaagcagcaccgactgtttagcaaaaacacagcactctgcagaaaagagaaaatgtaaagtataaagtgtgcggcctgccaaatagtagagaagaaatcgatgaaagtgacagcgagtaaaagatgaggtatanagaatggcggtcctaacggtaaggatccaaaggtagcgaa

SEQ ID NO: 399 - DNA, 315 bp, Cyanidium caldarium
  Clone ID: LIB190-008-Q1-E1-D10
aggaaaggtgaggcgggaggttggtaagagattactcattgtgcttggcctgaaggaggatgagcactatctcggtttctctcaagaaacccggatatgattcctttctagggtttgttcccatacaaggtattggtttgtcaccaaggaaactattcaataagtgttgtgctcgaccgaggagaacttggacctctccaaccaccataaagtgtatccaagacaacctccatgagtgggttcgttgtaaagtatttcgttgtggagaaaaacatatatttctaaggcctaacaacaacttaactgggttccaag

SEQ ID NO: 400 - DNA, 378 bp, Cyanidium caldarium
  unsure at all n locations
  Clone ID: LIB190-008-Q1-E1-D11
cccacgcgtccgcccacgcgtccgcccacgcgtccgcacactccttggccgacacggtngatgggcgacgagggcggatgcgcgtaggaatcaggtcatagatgtgtttctaaggtttgttcgcagacagtgaattagttggtcacaaacgagtcaatacaaaaagtgttgtgctcaattgatgatagcttggacctctggggagaccatctggtgtaagtaagatcacagcgatgaatcggttccttgtagtttagttcgtggtagagaaaaacattgtcttcgagggactatcaccatcttctgtacttccaagacactgtctatcgaaatagaccgccaactggatgccgaattgtttcgttctgcactcagatt

SEQ ID NO: 401 - DNA, 438 bp, Cyanidium caldarium
  Clone ID: LIB190-008-Q1-E1-D12
cccacgcgtccgcccacgcgtccgcccacgcgtccgcccacgcgtccgggaacaatgcacctcatactgctgggttccagtacagacctatgaaacttatcaatgttctcaagagaagaagaaggagtacagctatccttgtcaaacttatgagcaggtttcaactacttaccagtgtggtcagtacgagtcccaacaagtttactaccaatgccaaaagtataaggaggttactcagcaagaatgccagtacgtccaagagtcgtattgtgtcgagtatgaagaatgtcagcaagttacccaggaagtttctccttcagaaattgtctactacggtgaatcttcttctagcagtagttactactactagaacacttgtgaaatgcgcaaagtcgcaaagtagagtgtccttttttgaataaactgttactttttgtc

SEQ ID NO: 402 - DNA, 379 bp, Cyanidium caldarium
  Clone ID: LIB190-008-Q1-E1-D4
aagttaaaaacttattgggagatgagataatgaaatatcagagagagttggcgtctgcaggcggagaaaatgttatgttggcaacgaatcgagactcgctgtttgcttgttcgcaatatgtggtcacctttgaaagtggttctgctgctcaaggcttagtcgcgcctgttattcaatttttagaaagaatttagaagaattgtaaaatgaatagttatactttgagtggactcttccaaccaacaagggtttcttattgcgctctattgcgcaagtagagacactacgataacttttatttatggcaaaagaagtttcaacgaccactcaagtacatctctccctttttcgtaactaaaactattcttctttcctgttg

SEQ ID NO: 403 - DNA, 363 bp, Cyanidium caldarium
  Clone ID: LIB190-008-Q1-E1-D5
gatacgatggcgttttgttggtccgttccagtgcatgcatcaccatgtggcaacggaatggagaaacactcacacatgtacaatccagatgcacacgtttcatcatacgaattcacatgcgtttgcttgttcgatagagatggctatagtaacgagtgatagtgtgactgagagcaacaacgctttggacgcaactgactttgacaagtacgtgatgaagacatacaaacgacaaagtttatactttacacatggcagtggtgcatggctttgggatcaagatgggcgcacgttgttggcttttgttggtggtatacctacttgtagtgtacgtcatagccatccaaagctcgtggtggccgt

SEQ ID NO: 404 - DNA, 387 bp, Cyanidium caldarium
  Clone ID: LIB190-008-Q1-E1-D6
acgaggtcaaacacaaaaggttccgaaacaagaaaagaagaagcgtccaaaggggagggcttggcaaagactcaagtacaataggtattttggaccttttttgtatcatatgttcttatgtgccattgtaatctttaggcgttttgtgagtgttgttgttggttttggtaagagaagaggtcccaacgccaactcgtgaagcgactgcaatgataaagacaatactttacagcgttaaaaaaaaaaaaaaaaaaaaaaaaaaaaaaaaaaaaaaaataaaaaaaaaaaaaaaaaaaaaaaataaagaaagaaggaaaacaaaaaagggctgtacaacaaaaaggataaaaacatcgaacaataaaaataaagggggggcccccccaa

SEQ ID NO: 405 - DNA, 404 bp, Cyanidium caldarium
  Clone ID: LIB190-008-Q1-E1-D8
tgaatcaactcaagctgaagaactttcaggcaacccgaatggtccatcaggagatatagaaaacctggttttactcgatcagcattcttcctatgaaagtacgattgctacagcttcgggctataaacttaagatgttggtgattatctttgaaatgggtgtagctttccactccgtaattattggtctgaatcttggagtaagcacaggatcgacattccgtacgttgtttgctgctctcgtatttcatcaattctttgaaggatttgctgtcggtactactgtttccgaagcccagtttggcacttggaccactatagtaatggtactttgctattctttggaaactccaatcggtatatctattggtattggtattgcacacacttatcaggaaaactcct

SEQ ID NO: 406 - DNA, 442 bp, Cyanidium caldarium
  Clone ID: LIB190-008-Q1-E1-D9
tgaggttatcgtattggatgatgtggcggtaaaggagttgagaagtgtagttgaaaagccattgaagccggtagatcccacagcgcagtcgaaatatcaaccttttgagtgggataagaaatggaatgagagtattttggaggaagaagaacgaaatgaaatgtctgcagtttatcatcgtgccatacaggaagaagaagaagaagaagagagacgagggttgccatccgataacaaccacatctcttcctttcctgaaacctcgcaggaaaaaactggacaaaaggtatcttccaagtcccgtgtacatgctaaagacgatccattttacattacaacgactaagaagacacaatcgagatcgcgtagagaaaagtctaaagtagaagcagacgacgattcattcgaagactcgttggtttttgcgtcgcaatccaacgat

SEQ ID NO: 407 - DNA, 409 bp, Cyanidium caldarium
  Clone ID: LIB190-008-Q1-E1-E10
accggttatggcaacactacgtcactgtagaggcctttggaatcagttcgcaaacaacaacttggcactaaaaccagatcgattgcctttcttgaataaccatcgtgttagaggaaactttacactattttcgagaggtgttcagatttacaaaggctcgggtaaagattggctcccgaccttacacgttgcagttacaggtgctgcaggacaaatagcttactcgttattgccaagaattgccaatggagaaatgttgggagaagatcaacctatcgtccttcatttattggaagttcctcaggcactaagtaaactacaaggtgtagttatggagttggaagattgtgcttttcctcttgttcagggaatcgttgccacagatgacttgcgcaaagggtttgctgat

SEQ ID NO: 408 - DNA, 418 bp, Cyanidium caldarium
  Clone ID: LIB190-008-Q1-E1-E11
cccacgcgtccgctaaaatggatggaatcgactcgaaaatggcctataaatagcgtgatcatttcccctttttgtttgtttatcgtttgtcaaagtttggttgttttcttggtagcagttgtacattcaacatcatcaaatgccaaagggaggaaagaaagattcttcaaagaaagaagccacaagtaaacctgcagcagcagatgctacaaagacgacagaaaagtctggtccggaagccaagttgaagggaactggtgcaaagaaacaataaaaagttgactatgcatgtgtaagtatttgtggattttccagtagaacaagctaaagttgtttctgaaggcagtcctgttatgtcttgtgagttctgtttgatagtttccagctattcttttggtagtgaataaagagaaaattt

SEQ ID NO: 409 - DNA, 382 bp, Cyanidium caldarium
  Clone ID: LIB190-008-Q1-E1-E12
aaaatgtctcaggaataccagctcacctacttcaatattcgtggtttaggcgaacctgttcgtctactatttgaagacaatggcatcaaatactcggaagagagggtagaagctggcgagcagtggcaaaaactcaagcaagaaggtgtgtcttctggcaagatcccctttggtcagatgcctgtattgcgcgatgggagcatgtatttagcgcagagtggtgcaatacttcgtcatttagcgagaaaacataacctctatggagacacggaagaagagaaagcgttggcggatatgatcaacgactttgccaacgatcttcgaactccgtatgtgcgcatgatttacagtgatacgtggaaggagatgttacccgagtatt

SEQ ID NO: 410 - DNA, 186 bp, Cyanidium caldarium
  Clone ID: LIB190-008-Q1-E1-E4
tccgagctttcgactccgtacttattggtctgaatcttggaacacgcagaagatcgacgtccagtccgttgtttgccgcgctggtatctcaacatgtcgttgaaggatttgctgtcggtatgactgtctctgaagctcattttgggatctggactaatatactaatggtactttgcgagtcgttgg

SEQ ID NO: 411 - DNA, 417 bp, Cyanidium caldarium
  Clone ID: LIB190-008-Q1-E1-E6
atagactcgactttgctagaacaactacggttttggaacaaccaacaacaagacactgtcgaaaaagaaaaactccatactccgaaccgtttcgaagaaaccaagtccaaagtagaaaactttttatccaaattaaaacaagaaaacgaaaagctatttcagaatgttgctcagcacaacgtagaggtggaacctcgtgaagaaagttttatagaaatgaatatttttatagacaattctttgggacaacttgtaaaaaacgaacaagagttgtcgtcaagtcaagacaagccttggatagaagaactgtagtcgtcgacaaagtagcccgaaattcttttcttttcctctgtccattggaaggcgctgtttggttgcttggcgcatatattcaaaacttaaggtggaatggggttg

SEQ ID NO: 412 - DNA, 391 bp, Cyanidium caldarium
  Clone ID: LIB190-008-Q1-E1-E7
cccacgcgtccgcaagggctctgttggtagttcgcaacattatatgagtgtcattgactattatttggaaatcgttttttctattttgattccattggcacttattcgtaccaatgcatattttgatctattagtaatggttgaagatgctattctgggctcgtatgatcacagcggatacgactttttctcaggaaatcttacgagatatgcatctgcttaccattcgatgcatcatcgtcgttctagttgcagttatggagatggtgttggctctttagcgttgtcggacaatgttgtttcgaaccagtcattatcattatggatatcattcttttcctaacgtgatacatcttgtagatgaaaagtcatcttgattgtcatagatgtg

SEQ ID NO: 413 - DNA, 310 bp, Cyanidium caldarium
  Clone ID: LIB190-008-Q1-E1-E8
ggcaagttgcagataaggtcaaatttttctttcgtatgtattcgatgaatcgtcataagatgactacgcttacgccttcttatcatgctgagaattattctcctgaagataaccgttatgatcttcgtccttttctgtataatagtcgatggcagtggcaattttctaagatcgatcgacttgttgtacagaaggaagaaacaactaacgatattgctcattaaatgaatgatatgtttttgtggtgaaaaaaaaaaaaaaaaaagaaatgacgtaaaatcaaaataaaaattggtataaataaaatgta

SEQ ID NO: 414 - DNA, 82 bp, Cyanidium caldarium
  Clone ID: LIB190-008-Q1-E1-E9
agaaaatcttcagtaaacctttggatgtatctcatttgagtagcactgaaagtaactgaaaataaaacgaaaacacttttcg

SEQ ID NO: 415 - DNA, 431 bp, Cyanidium caldarium
  Clone ID: LIB190-008-Q1-E1-F10
cctttactgaaagtgcaactcctgaggaagaaaagaaaatcgaacgaattgccagagaacgtcctgttgtggacgtggaaaagttgaaagcttgtcgtagtgcagatgaggctttgaattttttttcttagagaataatcgaggcttttggtcttttatgtaaaggaggaaattttggtttcgacaactgcctcgtttattctgtgtgttttgtttgtgtgttttggtgtgtttgataaatatcatctattctctggtggcaaaaagaaaaaaaaaaaaaaaaaaaaaaaaaaaaaaaaataaaaaaaaaaaaaaaaaaaaaaaaataaaaaagacaaaaaaaaataaaaaatgaaaaaagtaaaaacaaaaaaaagcaagcattaatacaaaaaaagggggggcccccaaaagggttcaaggttaactta

SEQ ID NO: 416 - DNA, 422 bp, Cyanidium caldarium
  Clone ID: LIB190-008-Q1-E1-F11
tgcaagttggttggtttctggactttaaggcatctctgttctcttgttggtgtgactgttggtagatattgtgaaagatgggagtcaaagttggtattaatgggtttgggagaattggaaggctagttcttagagctgctttggagaaacagtctgtagatgtggtagctatcaacgatccctttattgatttggactatatggtctacatgttcaaatatgactctgtgcacggcgcttatccaggtacagtggtagcaaagaatggaaaacttgtcgtggatggacacgaaatggcagtgtttgccttccgtgaccctagtgagatcccttggtcctctactggagcagaatatattgtggaatcaacaggagtatttactgctgcagataaagctcgagcacatatgaagggaagtgct

SEQ ID NO: 417 - DNA, 361 bp, Cyanidium caldarium
  Clone ID: LIB190-008-Q1-E1-F3
gaaggacgatgttctcttccatccaactttgactgtagttattgttacactttaggacataccgctggggccttgattgaaggtggtcgcactggtcttgttgcaacggtacgtcacttaacaaaacctcccgaccaatgggaaattggaggttaccctttgaccgtcatgatggacatcgaaaggagaacgggaaagaacgttcccgtcatcaaaaaagcgttggtggatttgaaaggcgaggcatttcgcatattttctgagcagcaggactcgtggcgtttgacagaagattatcgttgtcctgggcctattcagcatttcggtccgatggcacattcgatgaacttcactttgatgt

SEQ ID NO: 418 - DNA, 384 bp, Cyanidium caldarium
  Clone ID: LIB190-008-Q1-E1-F4
cggtactggatgcttcttaattgtaaacactggagaaggcgaaggacctgttccatccaagcatggtctactgactactccaggttatcagttaggaccagacaaacctgttgcttatgcactggaaggttccatccctattgctggtgcagcagtacagtggcttcgtgataacttgcaaatcatcaagaccgctccagaaattgaggagttggccaattcggtgaaggataatggtgatgttttctttgtaccggcattttctggtttatttgcaccgcactggcgtgaagatgccagaggtgttattgtgggtctcacgcagtacactaccaaagcacatattgcgagagctgtgctggaagctgtatcgtttcaagtatg

SEQ ID NO: 419 - DNA, 390 bp, Cyanidium caldarium
  Clone ID: LIB190-008-Q1-E1-F5
acccacgcgtccgcccacgcgtccggtgagaagttcaattttggttggttctccattttattccgcacgagatgttcattttacatgcgatgtttattaggaactcgtgcgttcttggggtactatcgacgtttctgaacgaaagtattccatcgatgaagtggtacagagaatatctcaaggagaagtcattgaagcgtttggttcaggtacagcttccatcatcacacccgttactggaattcattatcaagacaaaatgtattccattgtctcagatacagaagagaaaatatctccaaagttattgaaaagcatgcaagacatattttatggtgaagttgaggacacattttcatggaatgtggaagtggatactgaataaataaa

SEQ ID NO: 420 - DNA, 378 bp, Cyanidium caldarium
  Clone ID: LIB190-008-Q1-E1-F6
ggagagccgaataccagcaccgctattacacctggagaaggaaaggatgtttctttgtcttccccaagaagcagcaatcctgaaacaatgaatgcaaatagttgtcatgtagaaacaacaacaaaggatgagagtagccatgttgttcaagaagaatccaccgagacaaagtcccatcgagaacaaatattagaggaagaaatagaacgtctcaagagcaaagttgccagtttagaaacggaagttagcgatttccagcaagacgcagaaaatgaacgtcgaaagaatcatcacttgatggaggcgaaaaagtatttggaaatcagtttgaatgaagttttacacgcctccaaaagcacatctgctgaggagatggag

SEQ ID NO: 421 - DNA, 391 bp, Cyanidium caldarium
  Clone ID: LIB190-008-Q1-E1-F7
gctgtgcgtctatttgaacaaagtggtatcgaaatgttggttgctcaaagctttgcaaagaatatgggtttatatggagagagagttggagcactttcttttatttgcaaggatacttgtccagttgacgctgttcaaagtcaattagaaactattattcgctccatgtattcgagtcctccagccaacggtgcgagaatagcttgtagaattctaaatgatcctcaactatttcaagagtggaaacaggaactcgtagaaatgtcagcacgtatccaaaatatgagaaagttgttatatgaagctttagtttccagaaagactcctggtgattggtcgcatattacgaagcagattggaatgttttcctttactggactgaatgcaaaac

SEQ ID NO: 422 - DNA, 383 bp, Cyanidium caldarium
  Clone ID: LIB190-008-Q1-E1-F8
cggacgcgtgggcggacgcgtgggcggacgcgtggggtagagtatccttgttgaatgagcgccatggatatggtagaaacggttcttccgagagccaccaaagttcgtattgcggggaataaccgtacaagaccgagtcttgttggtcagttggggtatatcaagtcgggacaaagtcttggtggttggcatgaagtagtgttagaagtaagtgattttggaataaaaaagatagagtctattcaatatatgcttttgtgaaaggatggagaagaactgagagtacagcggaatgcactggaagttgtatatgacgatcatggtgtccctattacagtggatatccctcctgagccaaaatactcgcaaccaactgccaacaa

SEQ ID NO: 423 - DNA, 404 bp, Cyanidium caldarium
  Clone ID: LIB190-008-Q1-E1-F9
cgtcgtacaatgctgagaagttggttgatgcaggctttaagcatcatgactggccctttgaagatggtggagttccctctgtggaaattatacagaagtggctttctctgttgagttgtgttacggataaggaagcatcggcgaagactatggagaaatcaggactgcacgctaccaataagttctcttcttcaatttgtggagatagtgcaagtgcgaatgatacctccaaaataagtatcgcagttcattgcaaaacaggtttaggacgagccccagttatggttgccatagcgttgatcgagatgggtatggatgcacttgatgctaatggctatattcgtgctcgtcgccgaggtgcaatcaacagccgccagcttttattcttggaacagtacagaccg

SEQ ID NO: 424 - DNA, 417 bp, Cyanidium caldarium
  Clone ID: LIB190-008-Q1-E1-G10
cccacgcgtccgcccacgcgtccgcccacgcgtccgcccacgcgtccgcccacgcgtccggtcgaacactgcttttggtgaagtgttcttcgtttcttgtgaaactttttgttagcaaattcaaataatcacctctttggtttgcaagtggttgtgttagcggtacttgtttgtttgaaaagaacaactgctttgtttcttcttgaaacaagtttcttgtgaaaaaaagaaaaaaaaaaaaaaaaaaaaaaaaaataaaataaaaaggaaaatcaaaaaaaagtgaaaaaaaataaaagaaaaatcgaaacaagcgcctcatctgccggtggaagaactttatcggtgacattcatgtggaagagaattgaacatgttcgtggtactttcgtgaacaatgcccttggtaattacttg

SEQ ID NO: 425 - DNA, 328 bp, Cyanidium caldarium
  Clone ID: LIB190-008-Q1-E1-G11
gttatgacttcgcaccaatgatcagaagatacatactaactttcgtagccatcaattttgcgagaccatcccagttttagtagactatatctcggactcaaagccattgtgttgtccatgtatggaacatggatagtaccccattgggagttaactttgtccaatgccttcgtgggaacattatttatcgcacttccctctagcttccaactgtaaccagattagcaaataatatgatcttgtttgaacgcaattggttctggggacccagaccttcagtttcaggagttctaaagtgttaagtcaaaatctctcggttcttctggcc

SEQ ID NO: 426 - DNA, 346 bp, Cyanidium caldarium
  Clone ID: LIB190-008-Q1-E1-G12
cccacgcgtccgcccacgcgtccgcccacgcgtccgagttatcctcatatgaatttagttggttttgttcactacaggtttactatcgaaaaccaagaaaatgttctttatatttatgagttgcatattgtcgatggatatcaaggacttggtattggaaagaaattggttcaagtcttggaaactattggggttcgaacaaaaatgaaaaagatcatgttgactgtatttaaaagaaatgtggatgcagttcgattttacaaagaaaaacttgggttttctttggatgcatcgtctccagaggtttttggagacttggaatgcaaatatgaaattctttcaaaac

SEQ ID NO: 427 - DNA, 383 bp, Cyanidium caldarium
  Clone ID: LIB190-008-Q1-E1-G3
cccacgcgtccgcccacgcgtccgcctgtttttgaatccccaaactcagtatataagtgaccaacttgatgttgcaataacagctccaatattttgcaattgtgctagtcgggttgttgattcaagtagcaagaattccgtggagttgagacgagatcccaacgaaatccaactttcagaggatgatgcattttagaacttgatgctgattgttattattttgtgttgtatgcttttggcgtgatatatagatgagtttctaaaatataggcttcactgggataatatttactttgccctagaaatatccacatatatcgagaccacaccttattccaacacacaagtttagtgagttggagcactttcacggtggttcccaa

SEQ ID NO: 428 - DNA, 366 bp, Cyanidium caldarium
  Clone ID: LIB190-008-Q1-E1-G5
aattccttccagcactattggaaatcttttatagaaaggtgctttgtgtgagagaatagaaagacttttatggaaaaggaacaaataaaatataatgatacgacaacagtgaaaaaaaaaaaaaaaaaaaaaaaaaaaaaaaaaaaaaaaaaaaaaaaaaaaaaaaaaaaggataaaaaaaaaaaaaaaagggcgaccccacaaaaggttccaaccttacttacccctacagttcaagtccatagctcttcaatcatgtcacttaatttcactacatcggccttcttataaaactttcgtaactggaaaaacactgcctttacccaatttaacctccttgcaccaaagccccctttaatcagccgg

SEQ ID NO: 429 - DNA, 343 bp, Cyanidium caldarium
  Clone ID: LIB190-008-Q1-E1-G6
ttgttgcccccccaaaaccgtttgcgccggcctccaagtataaaattccttgggtggtacaatttgagtatataaaactgggatgagaacacagaaacaacatattatgagcgtttgtaggtaccagagagaaaagggtgttttcaactgtttattttcgatgaccacgctgcaaccgtaagtatgtagtgtaaacgcggtagttttgtagttttttgtgttctgtgaagcctgtcgcattacagaaagtgacgagatacgtggatttgtaatcatatttgcattgttcaaggaaacttcactgttactctgaacaagtggttatagttttcgacttgccagg

SEQ ID NO: 430 - DNA, 372 bp, Cyanidium caldarium
  Clone ID: LIB190-008-Q1-E1-G7
acctcccaacttttatgacggcaggactatgtttcctgtctggttgcacgtttattccaaagagagatatatcatacaaaaagtttattcacccaactccttcttcattacttgataatagcttgtgtgaacgaaaactgaaaacctgttccaacattctctatcggatacgagcccaacaacagacagaaggaaaaaaagaagaagaaagaaaccaacaactcagtgattacgagtttgcagaacgttgtatggatggtggttgccctgtggaggatgttcaagaactcttggttcgtttagaggtaagaacgagtcaatttaccctttagggaatacttgagcaatgcgaggaataacatggaataatat

SEQ ID NO: 431 - DNA, 334 bp, Cyanidium caldarium
  Clone ID: LIB190-008-Q1-E1-G8
cactgacttggtgtatgaattggaggttaggctgtgtgcttggttgtgctattcatcgacgtagttatattcattcttgtagttgttgctatccatgcagcaaccatccaatgaacgattcattttcagtatcaatagtagtaatatgttccaagtggttggagtggtttcttggatactttcatagctatgttgacatagtggaagagataatccaagatatatttccaagtaaatttcgcggacatgaacgcattcattgtgctattcaatgtgcaatttgtaagccagatggtcacgtcttgtgacatgcaatgtaatattccaatgggaa

SEQ ID NO: 432 - DNA, 394 bp, Cyanidium caldarium
  Clone ID: LIB190-008-Q1-E1-G9
cccacgcgtccgcccacgcgtccgcccacgcgtccgcccacgcgtccgcccacgcgtccgcccacgcgtccgggaaagggaccttttgtagtggaaagtgttacttatcgctatcatggccattctatgtcggatcctgggttgtcatatcgttcgagagaagagattacggaaatgagaaaacgtgcagatcctatcgagttggtaaaatccagaatattggaacaaggttgggctacagaaaaggagttgaagtcgattgaaaaggaaattcgacaacaagtggatgaaatgacggaaaaagcgaaacaagcgcctcttccgccggtggaagaactttatcgtgacatttatgtggaaggaattgaacatgttcgtggtactttggtgaaca

SEQ ID NO: 433 - DNA, 369 bp, Cyanidium caldarium
  Clone ID: LIB190-008-Q1-E1-H1
cggacgcgtgggcggacgcgtggggttttgggatattttgcaacaacatgaacaaaatttctctagtctcctttctattatttggagttgtcatatatgcagttgcaggacctctcaaagactctcatatagcttccaaggttagaggatacagcagtcaatatactccaacctacactagcgagtatactccaagctatagtagtgaatacactcctagctatagcagctcctatagtccagtttattcttctccttatcaatcctcatacagtcctacctataaaacttatccatggattcaaccttgtgctcaagcttgtgcgggatgtctttactgctatcaacaatacaatttctattatccct

SEQ ID NO: 434 - DNA, 363 bp, Cyanidium caldarium
  Clone ID: LIB190-008-Q1-E1-H10
cccacgcgtccggattttcaagaaaccattccacccaaactcgcataacatcttttgatagagaactcttggacttgaaagtacaacgtgacaacttgcaacaatatgaacaacgtttaaaagactctttgacaaagtattacgagcttgcacgtcgtttggttacacaaaaggaacgtgagcgggcattggtagttttgaaagtgaaacatgcgttacaaaagagtatcgaacaagctcaaaatatgcgtttcaacctggagcaagttttgagtgaaatagaattgaagcaactggaagccgactatgtacagaaactgaaaacgggaacaaagttattacgagacattcagaaaaccttgt

SEQ ID NO: 435 - DNA, 389 bp, Cyanidium caldarium
  Clone ID: LIB190-008-Q1-E1-H11
gagaagaatttgaaatatgggaaagattggacgactaccctaagatattccgagataatgaaagcaccgttgtggaccttacgggttttgttccaggaatgatagccgaactgatcgggatgagtcgcagttttcctaacttgagtttcggggaagtggccgcgcggttttatgaagagtgttatgcagatatgcaaatagtacacagcgagtatatcaagtcattgacgcatgaagtggataagaaacagctttatgacgggcttcacaagctctttcgtggtagggaaactccggcaattacattatttgatggtgcctatcgagatcgaggtctcttgatagcaatgaatgatggatccttacaattttacaacagcataacatgt

SEQ ID NO: 436 - DNA, 360 bp, Cyanidium caldarium
  Clone ID: LIB190-008-Q1-E1-H3
cccacgcgtccgcccacgcgtccggttgcctaaggttgtggatgaacaaggtcgtagttatgggataggtgctagaaaaacttccacctctgaagtttggttgaaagctggcacaggaaattattttgtaaatggaaagccaatgattagacactttcgagaaattagactgattgaagaagcactggaaccactattacactttaatattgctcaccaattcgatgcggattgctttgtagttggtggaggtgaatcaggacaagcaggtgcgctgaaacacgggattgcacatgcattgaaactttttgaccccgcttactatccagaactgtataaactcggttacttgctacgtga

SEQ ID NO: 437 - DNA, 448 bp, Cyanidium caldarium
  Clone ID: LIB190-008-Q1-E1-H4
tcagggtcgacgcgacgcgtcagcccacgcgtccgattgaaagagagagagcaaaaagtattggagtgttgtaaaatgtcaagttttctaactcgagcagccttgtcattgcgtggtgtaatgcaaacagtcataaactttcggaccgcaaggggagtagcaacgagactttatcacgaaaaagtagtcgaccattatgaaaacccaaggaatgtaggttctctagataaaaacgacaaatatgtgggaacaggtctagtgggtgcccctgcctgtggagatgtcatgaagttgcaaatacgagtagatgagacagggaaaatagtagaaagtaggttcaagacatttggttgtggttcagcaaacacttcaacttcttatgcaaactagtcattcaaaacaattggtttcaaaaaggcaattaaaattaggaccaaggaaattgcag

SEQ ID NO: 438 - DNA, 367 bp, Cyanidium caldarium
  Clone ID: LIB190-008-Q1-E1-H6
cccacgcgtccgcggacgcgtgggggaacacggaggacgacagtagcgatgggattgtttagtagactgtttgtgaaaccgagtcgtgtaccgcaaagagtcgtagagtttcaaaagcgcaaggcggaaggctactttacatacaacgccgggaagtacgaccgatacatcaacacacctatttacctgtttgtgtccttcaccggtctttatgcctttattgacggttgtctttgggcggcaggaaagaaggaaagtcaatcgtgaatagcgttttttgtccttgtggacagtcttatgaactagtgattcgtttgttctgccagttttagtttcttgtaatgaaagtttccttttttttccttgc

SEQ ID NO: 439 - DNA, 379 bp, Cyanidium caldarium
  Clone ID: LIB190-008-Q1-E1-H7
ggcacaggattcctttcaactattcctgcaatatatctgatggaccgactgggacgtcgaccactgttacttactctcattggcggagtcgtggcaggtttatttattgttggcttttcattccttgcttccaatattcacaccaaggaaggtatctatatttggggcgttgtcatctattatcttttctggggttctgctctaggtccaactccttgggtggttgcttcagaaatttatccaacctatttacgtagtcacggaatgttgctatctgatgttacaaactttacaggcaactttattactacatacgcattcaaacatatgaccaatgcaatgacgaatacaggtacctttgttggtttctatggaggtc

SEQ ID NO: 440 - DNA, 380 bp, Cyanidium caldarium
  Clone ID: LIB190-008-Q1-E1-H8
gaaatatcagagctgccctacttatatcacgcagccaactatcatacccaagtactgcagtatgtcgggccctgaagagtatgttcagcaacagcaatgtgtaaagtatgtagcccaacaagttaacgcaaccaaacaatgtgtcaagtaccataacgagcaaaagattcaacaaaagtattggtcccgctatgttaactgagaaaaagtacaaagcaagcagtgcatcaagtatgtatcccttcagaaagatcaagtacgagtcatgctctgctcaatatgaagttcaaaagatcaagcagcaacaatgtactatgacagtctctgaacaatacatacagcccgatacttgctacaagtatgtccctgaacaacaattg

SEQ ID NO: 441 - DNA, 433 bp, Cyanidium caldarium
  Clone ID: LIB190-008-Q1-E1-H9
cccacgcgtccgcccacgcgtccggtacaagttgtgtcgggtaaagagagcacaaatgggtgtaggtggaattccctacatcgcaacgcacgatggtcgcaccattcgttatcccgaccccttgatcaaacaaaatgatacggtgattgtggatttggaaacgggaaaagtgaccgattttctcaagtttgaagttggcaatttgtgtatgattaccggtggacacaacattggaagagttgggttgatccagcatagagagaaacaccctgggtcgacggaaattatccactttcgaaatgcgagaggtcaagagtttgcgaccaagttggcaaatgtgtttgtgattggcaaaggtaaatagccgtttgtttcgttgccgaaaggtaaatgcattcgattgtctattttagaagaacacgaaaagatgatg

SEQ ID NO: 442 - DNA, 414 bp, Cyanidium caldarium
  Clone ID: LIB190-009-Q1-E1-A10
accacgcgtccgcccacgcgtccgcgatgagcaatcctctgcatcggcagggtttcgtcgggacgtacttgttcgtttcccaacaaccaactatgtttatcagttggctctccgtctctgttgctgctggcagtagaacacgtttgcatcggtcaacgcttgataggaaggtttgccgatgtttttgtcgaaaccggtggaaacataatattcaagtatgaacgcatatttagtctttttcgctaacctaagtccgcctcgagagttgcaattgcgaagccgcgacggggaagaccggaaaaggatctaaagacggagcaggtgcaacccacggcggaacgagtcgaaaattggaagcctaaccctttgcttctagccgctggtacaattgctttagcgtctgctggaggatac

SEQ ID NO: 443 - DNA, 401 bp, Cyanidium caldarium
  Clone ID: LIB190-009-Q1-E1-A11
acgcgtccgaggacgcatgggcggacgcgtggggtgaaaacgagttgattctgaaaacaatatttttatctgtgaaaccaaaatgctatggttgggatactgctccatgatattattcaggttgaatccaactagcgagagcgaactattccaagcttgttggtattgattgaaaggcttgatgactttgcaacagtaaccggttgggacgaaattcaagaggaattttggaaagtttgatacctactcgtgaacacaaatactgaagaatcatgtaacaatgcagtgtatgtttattactttcatagctaatttagaggaaagtgtaacagttgaatttgaccagtcctgtcgttttttattcttttatagataaacttccttaagattttgatcttcct

SEQ ID NO: 444 - DNA, 393 bp, Cyanidium caldarium
  Clone ID: LIB190-009-Q1-E1-A5
cccacgcgtccgcggacgcgtgggcttattgtccggattggtggcgattgggaacgagaaaggcgtcgacgacgaaagaagatcgctgtaggaacaacgacataaaatgtctgttttattacaaagttcggatttccaacacattcttcgtattctgaataccaacattgatggcaagaggaaagttatgtatgcgttaaccgccataaagggtgtgggtagacgtttctccaatttagtcttaaaaaaggcggaggttgacctgagtaagcgtgctggagatttgacgtcggaagagattgaccgcatagtcaccatcatgcagaacccccgacagtttaaaataccagattggttcctcaacagacaaaaggatttgagagacgggaaata

SEQ ID NO: 445 - DNA, 357 bp, Cyanidium caldarium
  Clone ID: LIB190-009-Q1-E1-A6
cagctcaatggcggagaaaggactggttgttgtgataggtgcaacgggtccgcttggaaaagaatgcgttctggcactggaaagtgaaggatatcgtgtccgtgcagcaagcagaagggttgaaacggctcgtgagatgctactccacaaggtaaagaacccttcgagagtggactttgtccatgtcgatgttatggaaaaatctgtactttctagcgtattaaaggatgctgaagtggttttcttctgtgcttcagcttctgcagggtggagagtccctggtacttctaagaacaccccgaaacaggtggactacttgggcgccattcatgtcgcacaagcggcagcccaagctaa

SEQ ID NO: 446 - DNA, 390 bp, Cyanidium caldarium
  Clone ID: LIB190-009-Q1-E1-A8
acaaccgtcaagtggagcaacgactggttggttgttggtgaaggagcacaagtgttgcattgttgttcaatactgtttgtaatagtagcagtgagagtatcatgacgagtagtaacagtggtagtgctcatcaacaagccaaggattgggtggagtccattagcaaaaatgagtggacaaagcctgcagctgctgtggcaggaactttggcctccttgggactgataagaatgtattctaatggacctgtatataaaaattccgtcaacttgaagggcaaagtagttgtagtgacaggtgccaatacaggcattggaaaggaaacttgtattcagttggcaaaaatgggcgccactattgtgatggcttgtcgtgacccatcgagagctc

SEQ ID NO: 447 - DNA, 328 bp, Cyanidium caldarium
  Clone ID: LIB190-009-Q1-E1-A9
actggaaaaggctttcttaatcatcaacagaaacaaaaggctatgcgtttggcacgtaaagcaattcgtggaataagtaaaaaggatagacgcaaaggagaatctgaccgaacaatttataatgaaaaccctaaacatttacttgctggaaaacgcaaattgggaaaaacccaacgaagataaatcataaatgttctaggcagcaagtggcttggcaggtaatatttttccttggcattgtccaaatccaatacgaatatttctacaatgattttgcacaacaaaactcagcattagaacagtagaaaataaaatagcgtgcgcaact

SEQ ID NO: 448 - DNA, 393 bp, Cyanidium caldarium
  Clone ID: LIB190-009-Q1-E1-B1
agttttaatggtgttgcaaaccacatcatgtcacaacaaccgtcttctgcacttcgagtcgttgtattcagtaccaaagactatgatcaaagtggattgacagaagcacttgaacgtgttcctaatgctgctcctataaagtttcggttcttatcgtccaggttgtctgcaaatacagctgagcttgccaaagatgcagacgctgtttgtgtttttgtcaatgatactgtgaacaaggaagtattgaagatacttcacgacagaggagttggtttgatagctttgcgttgtgcaggcttcaataatgtcgatttaaaggcagcttccgagttgaaaattcctgtggttcgagtacctgcctattctcctaatgcagttggagagtttgttgct

SEQ ID NO: 449 - DNA, 405 bp, Cyanidium caldarium
  Clone ID: LIB190-009-Q1-E1-B5
agtgtgtggtactttggattggggacaactgagtttttattatgggtatcgatctcgaaaaaggaggtcgtattaagaagcgtaatagaactgcgcccaagtcagaaaacccttacctgcttttattggtcaagctctacaggttccttgcgcgaagaaccaactccagttttaacaaaactgtattgaagcgactttatatgtcacgtaacaatcagccacctcttggtttaggaaggttggtgaagctgtctcgcaaaaatgccgacaagatcatcgtcgtcgtgggtaaagtcttgaatgatgagagactttatcacgttcccaagattactgtctgttgtttgaagatttctgatagtgcaagagcgcgtattcaaaaggctggaggagaagttttaacct

SEQ ID NO: 450 - DNA, 443 bp, Cyanidium caldarium
  Clone ID: LIB190-009-Q1-E1-B6
acgacgttcaagcgtgcgagtttgtggcaacgtacacagctcgatagaaactgcaaaagttatctaagaaacttgtcaacagcacttgcatatcgctttgttcatatgagcagtccacaagactcagctagtatgaataacttcaatattgctctttgtcaaatcctatccacggataataaggaggcaaatatagcaaaagccgtggaggctatagagaaagctgctagaaatggagcgaaacttgttgttctccctgagtgtttcaactctccttacgacaatgctgcatttcctgtttatgctgaagaaattcctgaacccggagagcacgtatctgaaaaattcaaaacttgttttgcactgtcagaagcagctaagaaatatcaagtccaactatattggggggctcattacctgaaagggatggttcaaagttgtac

SEQ ID NO: 451 - DNA, 241 bp, Cyanidium caldarium
  Clone ID: LIB190-009-Q1-E1-B8
acccacgcgtccgcccacgcgtccgcggacgcgtgggcggacgcgtgggtcctgttccagccttggcttcggcactttcttagtatgacagttttcgccaagaaatactttcaagtagtcaactaatacaagctcaacgtgactattttggagcgcatacctataaaagactggataaagaaggggtatttcatagcaagtggttgtgaggtaccgctcttctttatttttactcaacaaa

SEQ ID NO: 452 - DNA, 413 bp, Cyanidium caldarium
  Clone ID: LIB190-009-Q1-E1-C1
caacaaatttaaaggttcccccgggaaaataattccaattggcggtaaccccaatggtgtcaaaaaacattgactttaacatacaaaaccaataatattggcaacattaacactggaaaaaccttggaaaaggaattcaataccccttgtccccaggtggaaaaacctggcattgcaccatttgatatgaacctaaggtccaagttgttgcctgtgaaggaagaactgcacttcattgcagcgaacaaggagtttacggtaaaaatgtttcacaagaaggaagaaaacaaagttacatatgttgttcgtgctggagaacgtgtacagggaccgccaggttatgtccacggaggtgctattgcgacactattggacgattgtcttggcaatgctgtttttttgaaccgggccct

SEQ ID NO: 453 - DNA, 385 bp, Cyanidium caldarium
  Clone ID: LIB190-009-Q1-E1-C5
acccacgcgtccgaagagaagagagaatgctgggtggagtagcgaaacaagagaagggaagtaaaaggtaagaaagaggaaaggtttacgagagaaggaagtagaaagaagagagtgtaaggcggcgtcataatagaaatccaaaaggagaagaagagagggtaggcttagaagcagcaaaccagagaggaaagcgttaaagcatgaaagaaaagaaatccgaaaaagaagagaaaaaggtaagaaagaggaccgaatcagggtaagaggtagaggagcaagaagtatgacccagtaatgaggagtggagtaaacagaaaaggaagtaaaaggagggaatgaagggaagttatggcaaaaacacgtgccagcagcagcggtaaaa

SEQ ID NO: 454 - DNA, 396 bp, Cyanidium caldarium
  Clone ID: LIB190-009-Q1-E1-C7
acccacgcgtccgcatgaacgcttgccaggtattacagaaacagccaaaatatttgctggtgtggatgttacgaaagaacctattcctgttcttcctacagtacattataatatgggaggtataccaaccaactggaaaggacaagttgtgacgttaaaagatggaaatccaaatagtgttgttcccggtttatatgccgctggagaagctgcttgtgcttcggttcacggtgcaaatagattaggagctaattctttgctggatattgttgtctttggaagagcctgtgctcgaacagttgcagaattatataaacctgaacaaaaacaacctcctttaccggcagatgctggagaagaatctatagctagattggacaaatatcgacatgcaaa

SEQ ID NO: 455 - DNA, 387 bp, Cyanidium caldarium
  Clone ID: LIB190-009-Q1-E1-D3
acccacgcgtccgcggacgcgtgggggagtttttaagaggcatcgacaatcctatcggcatcaagtgtggaccatctttggcagtcgatgatttacttcgtttgttggatattttagatcctgataatgagcctggacgtattacactgattgttcgtgttggagcaggtcgagttgccgaacatcttccaaggtttgtagaagcagtgcgcaaggaaaatagacaagtggtgtggagttgtgatcccatgcatggcaatatggaaacatccaaatctggttacaagaccagaagatttgagaatattctgtcagaggtcaaagaattttatgaaattcaccgtcaactccattcctatccgggtggaattcatttggaaatgactg

SEQ ID NO: 456 - DNA, 407 bp, Cyanidium caldarium
  Clone ID: LIB190-009-Q1-E1-D5
aatttgactggggtttatagaatatgacctttcgatattttctccatgcatgtacaacatgtgtacataaatataccaactttgtttgaaaacatctttatggaccagtaactgttggaatgcctctcccatcaaaagactaggacttggtccaagcaatgattgtgggagaaatattgtttccattagttgcttgggcttcagtatagttggtggaggtatcatgtctttttgtgtacaagtgcaaactttccacctaccttaccttgaaagggaacaacaatagggtttctttttgtacaagactcgaacaagttggaaatgtacgagcatcgttatggaatagttggtagcacaaggccaaattggactagtttgtaagcttgactaggaagggttcttttgga

SEQ ID NO: 457 - DNA, 386 bp, Cyanidium caldarium
  Clone ID: LIB190-009-Q1-E1-D6
acccacgcgtccgattcggagggaaatgagaaagttttgggcatctttgcaggtgtttagcttactttttatagtcttgttgtttggatacaaaaatttgtatacaagtcccagtccgaagaagagaaaagcaagcaacatagattactttatagaagctgctaatccgaggattggtcatataacaccttttattcaccagtgtttttttaacgacaacctgtcaaatgccccttctgtatattcagtcagtaaatcttcgttaactaggcataatcccaactttttgtatcacttatggacggagtcagaggcagaagaacttatcaacaggttttatcccggtcttcaacaagtatggaggaaattcaacgagtcgtttgttt

SEQ ID NO: 458 - DNA, 381 bp, Cyanidium caldarium
  Clone ID: LIB190-009-Q1-E1-D7
aatcgattgttgaagaagagaggacgagagagtgcctctaccgctaagaatatctcgtcatggttggaggtttagagagtaaaagaacaaagcgcaagagagaagataaaactttacaggaaaaccttcccaaggactggttttgggtatggtggccagactcgggttggtggaaagttcgtataacagaggtagaagaagaagagtggtattggccagggacacaagagcctttggataccccgattttgcctctaactatttcttacgacagccataaaactgggaatacttgtttcattgaacaagtattgtggcatgatggagtgctttatgaccaagaaggggaagaaaagataagttattgcttgagtccgccac

SEQ ID NO: 459 - DNA, 434 bp, Cyanidium caldarium
  Clone ID: LIB190-009-Q1-E1-E11
acgcgtccgcattgtagaatttttctgtttcgtttacttgtctttttgttgagttatcatggcacgaacaaaacaaacagcacgcaagtctaccggtggtaaggcacctcgaaagcagttggcaaccaaggcagcaagaaaatccgcacccgtaactggaggagtgaagaagccccatcgttaccgtcccggtactgtcgccctgagagaaattcgcaagtaccagaagagcactgaacttcttatccgaaagttgcctttccaaaggttggttcgtgaaattgctcaagactttaagacggacctacgtttccaaacttcggcggtgactgcccttcaagaagcctcggaagcatacttggtcggtttgtttgaagataccaatctttgcgcaattcatgccaagcgtgtaactatcatgcctaaggatattc

SEQ ID NO: 460 - DNA, 425 bp, Cyanidium caldarium
  Clone ID: LIB190-009-Q1-E1-E12
ggtccacgacgcgtccgaagaaaacttgtattgtggaaaaccaattgagggagtggaaaaagaaactcgatagtctagcagacaattattcgttgggtacgagagcctatgatgcgagaatgtggtcattggacctcatcgcaactattatgagtgtctgttttgcagtttttggaatgttttcacaattctttggttattatgtccaattgcccatttacaatatgggaaatgcgagtcaatattacttttatggcgtgatgggaggtatttccgtcggcctgtcgatcagcgtctatttctctacgcgatggtttcttcgtcacttttctcaggtattttgttatgacggtacaggacaatagtggtcataaaaattcccttggttttttgttaaaaaaaaaatactcaatataccccgttag

SEQ ID NO: 461 - DNA, 403 bp, Cyanidium caldarium
  Clone ID: LIB190-009-Q1-E1-E5
acccacgcgtccgggacaatggaaagtaacggtggtggtggtggtactacgcgtctttcttcttcttcttatggttgggaagcactcggcaaagaagccagacgcctagaaagtgaaatagactccaaattggtaacctatgcaagtttcacgagagcagaatcgagaaatagttttgctggaaacaagaatgtggtggcagacgaacaaaaactatccgccgatttggaacaattgttgaaaagactaggacaagtgaatgaatcgatgggtcggtttctcgcttcgtccaacaatattagcttgagtcaaagtcacgcactggaacgacaccaagaaatattatccgattatatccaagaatttcgaaaaagcaaggctgcttttcgaagttggttgggaa

SEQ ID NO: 462 - DNA, 381 bp, Cyanidium caldarium
  Clone ID: LIB190-009-Q1-E1-E6
acacacgcaattgttgaatgccggtcaagttttgtaaagaatgcaacaatatgttatatcctatggaagacagaacttatcttcatgaaactggagaaagaagaatgttatacgcttgtcgtaattgttctcacagagaagttgcagaagacttgggagttccagtttaccgtaatgtggtaacttcgaacaacagaggaaagtttttacaaatgtacgatgtgtggcttgaccctactctacgaagaacacgaagtactcagtgctctcaatgtggaaaccgtgaagcagtttattttatgggacctgttggacgtaacgatacagcaattgttttatactttgtgtgtactaattgtaagcatcaatggtcaactgcag

SEQ ID NO: 463 - DNA, 324 bp, Cyanidium caldarium
  Clone ID: LIB190-009-Q1-E1-E8
acgagaacgaatatctattttttacgtgactttattgacgaaaagaaatgtgaaagcaggtagcgcttcgaagtttgtagaatttcttacttttgacaactttcctgataagatgaagccatttatagatgttgggcagaaagtacgaaggaggcacaagtcacaaagtcgacgtccggtcaaacgtacagcatctgaagaaacttcagagttgaatgtcgatgtatagacagccgctagctgtcttaacggtccttattcctgtaatggaataacacacctgtcatttacactggaataaacagtcttctagttgtttcctcg

SEQ ID NO: 464 - DNA, 185 bp, Cyanidium caldarium
  unsure at all n locations
  Clone ID: LIB190-009-Q1-E1-F10
gtccaccgacccgtccgaatgaaaagcagagatctctaaagaaaggcangaaagaaaagaaaggaaaacacattaaatgaggcaaaaaaccataggaattgaaacggattaggaacccttgtattcaatgcattaaaagaaagaatgattangaaaaaaggaattcattccacaanggaattaaa

SEQ ID NO: 465 - DNA, 432 bp, Cyanidium caldarium
  Clone ID: LIB190-009-Q1-E1-F11
cgcgtccgaggacgcatccgcccacgcgtccgcccacgcgtccgagtatcggtagaacagcctgtgtatgaggttgaaaagaagaccgcagaatatgagataagaaagtaccccagcttaagaatagctgaagttcatcgttcagactggaaaaaagaagaatggctcggcatacgactttgagtcgcaagcatttcgagtgttggcgtcgtacattggtgtatttggagaacccaaaaacaaagatagctccaacacgcatgttaagatagcaatgacagcacctgttttatcacagcccatagggtccgtggaaacaagaatggacgacagcagtctagcgtttatattgcccaaggagtatgcagagcaacaagaacctccacagccattagacccacgagttcacttgcgtattgtacctgtcagaaa

SEQ ID NO: 466 - DNA, 444 bp, Cyanidium caldarium
  Clone ID: LIB190-009-Q1-E1-F12
ggtcgacgacgcgtccgaccacgcgtccgattttttgaagagtattctttgcagcttccatttcgtgcatctggcactgaatttccacaacaataatagaagaaattaatctataatactctattttgttcatttcggagatcttggcaacttgcaaagcaggtgacaaagcctttgctggagctccaacgcgtaaaaagatatcagcttcccaaagtttcgactccaaataatcaagcggtttttctagtgcaagatttagcacaatattgaaaagtcagatgctttatatctatacctttggaaatggaaagcttttcccattcactacgtattcttcgtgcatattcgtagtcatcttctaacattgccaaagcacaatgtgccttgtggaccataagcgtatgatctgtgttactggaattttctatagaaggaacaata

SEQ ID NO: 467 - DNA, 352 bp, Cyanidium caldarium
  Clone ID: LIB190-009-Q1-E1-F5
atggaaacaaggattgcaaataatatgtcgtcatggagtttctgtggatggtaatagtagtgcattgcaattggtcaaggaagaaagatatcccaactgcagtcgcaagttgaacgataccgtttcctccgacagactcgtagaaataagcaattgtgtggatatggcaaaatatattcaacaactggttgcgcaagattattcttccacataaaccgtattttgttgctccaaaaaaaaaaaaaaaaaaaaaaaaaaaaaaaaagaaaaaaaacaaaaaaaaaaaaaaacaaaaaaagaaaaaaacataaaaaacaagcaaaataaaaaagaaaggaaaaaaatcaaaaga

SEQ ID NO: 468 - DNA, 168 bp, Cyanidium caldarium
  Clone ID: LIB190-009-Q1-E1-F6
aaaaagaagggtatggaagaaaagagcaaagagtttttgtccatcaagaagactgtgagtggagaacaagtaggagaaactggtggagaagtatatgtacctctagaaagaacaaataatccttgaaatgtatctagaatagaataaaatcgtttcttctctgtattc

SEQ ID NO: 469 - DNA, 372 bp, Cyanidium caldarium
  Clone ID: LIB190-009-Q1-E1-F7
acctcctatgcctcgaggagtacctcagattgaggttacgtttgatattgatgccaatggtattttgaatgtgagtgcagtggagaagagtaccaataagagtaataagataactattaccaatgagaagggccgcttatcacaagaagagattgagcgcatggtaaaggaagctgaacagtacaaggctgaagatgagaagcagaaagttcgcattgaagctaagaacagtcttgaacaatatgcctacaacctgcgtaatacactacaagaagataatgtaaagaagactttggcagagagtgatcgtgagacacttgagtccaaagtgaaggaaactttggattggattgatacgcatatggatgcctc

SEQ ID NO: 470 - DNA, 407 bp, Cyanidium caldarium
  Clone ID: LIB190-009-Q1-E1-F8
acttccgcagcagtgcctatggaagaagtcactggagaagaaagtggggctggtgctagcgcaagtgagaaacctagaaagagatttgaagtgaaaaagtggaatgcagtagcgttgtgggcgtgggatatcgtcgtggataattgcgccatttgtagaaaccatattatggacttgtgcatcgagtgtcaagccaatcagggttctgctacttcagaagagtgtacagtggcttggggagtttgcaaccatgcctttcactttcactgtatttctagatggctgaaaacgagacaagtgtgtcctttagacaatcgtgactgggagtttcaaaaatatgggcgttgaaacttcttcatctggaaaaaggagacctagacaaaaaagagctcttatttaaagaaaaa

SEQ ID NO: 471 - DNA, 459 bp, Cyanidium caldarium
  Clone ID: LIB190-009-Q1-E1-G11
ggtcgtagattcacgggtccgacgacgcgtccgaccacgcgtccgcccaatgttcctcttcgactgtatcgcggacatagaatggcaacagataaagtcagctaagaagatatactcttatgtaaaagaatcaaaaaccaaagaatatttggagctagacgattcgttgcagcagccagtggattcatcttgtagcaccaagtggctgtttattgcaaccccactgttggaagttgcttgtactgatgggcagcgaattgaaatgattcctttgaagaaagatataaaggaattgtttttctctactttaaagaagaactttgagtcgaacgaagcgtcatgggagtgcagtgtagttgaaaccgcagttgctgtttttatccagtattatgaacagtgcgtggaacagtactatctagcaggcaaagattatgagctacctggttattccaaagttaa

SEQ ID NO: 472 - DNA, 325 bp, Cyanidium caldarium
  Clone ID: LIB190-009-Q1-E1-G4
ggtcgagccacgcgtccacccaaacgtccggaagaaggtaaaggaagagaaggaagaagcagagagggactatgagcgagaaggtggatagtcgagagggaaaaagcccagaagccaagataaggtatcaaagtaaagaaagaaggaaaaggagaagaagagagggtaggcttagaagcagcaaaccagagaggaaagcgttaaagcatgaaagaaaagaaatccgaaaaagaagagaaaaaggtaagaaagaggaccgaatcagggtaagaagtacaggagcaagaagagaagagagaatgctgggtggagtagcgaaacaaga

SEQ ID NO: 473 - DNA, 391 bp, Cyanidium caldarium
  Clone ID: LIB190-009-Q1-E1-G7
acggacgcgtgggcggacgcgtgggtgaaaatggacccacaatgacgacaaggtggttgttagacaagattcctccgttgagtcgtattctattactcatctttatttttggttccttttgtgtttggtggttttctttggagccatatgttttactcgttcctggactgacaatatctcgcttttatatttggaatgtattgacatatagtttggtggatgttcccctgtgggagatgggattgttggttgctcctttaggctttctttattctatgttggagcgttcttggggggttgttcctttgttgttatttatagggtttgtatctctttctagtgcttgttctagtattcttctactagttgtcttgtacacttggaaaagaga

SEQ ID NO: 474 - DNA, 439 bp, Cyanidium caldarium
  unsure at all n locations
  Clone ID: LIB190-009-Q1-E1-G8
accatggtttcggaagaaaggatttatgtggatatcctagagcaacagagtcgtcttatatgtgaagcttctagcgctaactggggttgctgtaatgagtacgccaagttctcgttctttagtaggaagcttcggaaaacggtatttctttgcgcgaaacacttgacttggattctggaagagccggaacaagagatttcaggtgaaagagttagagattatgaaacagtcgggaaaaagacaacagcgtttcttgtaatagaccctgagggtgggaacaggccttgtatggctgtacatgcagcaggcagaaggaggggaaaagtttgtggtcttcgaaacaccttttgtttctacagctttatctttaaagactatatatatttatgcacgggacacattttttagggatanacggtcaagtagcccacgtagtatc

SEQ ID NO: 475 - DNA, 390 bp, Cyanidium caldarium
  Clone ID: LIB190-009-Q1-E1-H10
accacgagtccgcccacgcgtccgcccacgcgtccgggtgtatgatgcaggcaaagaagtgacgcagtagatcagagagtaacacatgcaagtaggtaaagcgaacgggtgagtaaggaggtgtgaaagagtggaagaacatgaaagcacagaagaatgtaagaaatggttagagtaaaaaccataaaggaggcaaatacgggaaagcagtaaaagaagaaagagaaaggaaaaaaactgagtatcaggaagaaaagagggagtagatgaggaaagaaagatcaaggaagtaagagtaagagaaggagtaatgtgaatgaaagcaggaaagtatttgaagaagagagtgtaaagcgcgtaccttttgcataatgtcccagcgagtgaaag

SEQ ID NO: 476 - DNA, 347 bp, Cyanidium caldarium
  Clone ID: LIB190-009-Q1-E1-H11
gccagactacatttggggtcctgtacaaattccgcaaggatatttgctggttttaggggacaaccgaaataatagttttgattcgcatatttggggtttgttgccgaaagaaaaagtgatcggcagagcgatattcaaatattggcctattcatagggttgggtggatcgaacattgaacgcagtccgagttgccgccagatgcgtggtttattatatcatgttgacattttggggcgttgtgacgaatcgaaaggtgccgttactcgttgcaaatagacgagaacgtctctcatttgcacgacgttggaaaacaatcatttcataaaggtcatctaccatcgttcg

SEQ ID NO: 477 - DNA, 419 bp, Cyanidium caldarium
  Clone ID: LIB190-009-Q1-E1-H12
cgcgtcagaccacgcatccgcccacgcgtccgccaatggaaagacagtggaggttatcaatacagatgcagaaggaagacttacattggccgatgctttggtatatgcagaacaaatcgatacaatggactgcatcatcgatgtggcaacgttgacaggcgccatcatcatcgcattgggaaatgactatgccggttattgggccaatcaggaagcgttggcgcaacgaatagaaactgcttcgaaacgatgcggagaaaagttgtggagaatgcctttagtgaatgaatatttggagtctttgaagagtaagattgccgacttgagaaatgttggtggaagggctggtggctccattgctgcggccttgtttttaagagaattcgtgaagcagtctccttgggcgcatatagatattg

SEQ ID NO: 478 - DNA, 398 bp, Cyanidium caldarium
  Clone ID: LIB190-009-Q1-E1-H4
gggtcgaggcccgcgtccgcccacacgtccgcccacgcgtccgcccacgcgtccgcggacgcgtgggtaatatgaataatagaaaggataacaagaacaagacagtagatatgaccaaagagttttttagggagcctccaagacgtggaagaggaggaaatagtcgcggtattggagggaataggagaggaggaagaggaaaaaccggtcctccaaatacttccaataataactatcgacgtgaagaaggaatagtggaagaagcaagaaatgatcatagacgagctgcttctcgatcgagaggttttaatgctcctcctcgacgtggtttttcttcttcgagaggaggaggtcggggtggctttcgttccaatcgaataaccacgccaagtatttca

SEQ ID NO: 479 - DNA, 386 bp, Cyanidium caldarium
  Clone ID: LIB190-009-Q1-E1-H6
acacaagtgttataataatattgcagctagaatgatcaaccaggttagtcacaacagtgcctccgtaatgtttgcaacgcacaacttggattctatggagagagcagctactgaaatggctgaaaaacagctgcacgctagcaatcctaacgtttatttcgctcaattgtatggaatgggagattctatgacaatggccttagcgaaggaaggttataacacttgcaaatacgttccattcggacctgtacaggaagtgatgccttatttaactcgtcgtattgaagaaaatcgagacattcttggcggtgcttcaaaggaagtcggtttgtttggggaagaacttaaacgccgcgtccttttgaaggcagcttgagtctgttttt

SEQ ID NO: 480 - DNA, 445 bp, Cyanidium caldarium
  Clone ID: LIB190-009-Q1-E1-H7
agggaagtatgacccagtaatgaggagtggagtaaacagaaaaggaagtaaaaggagggaatgaagggaagttatggcaaaaacacgtgccagcagcagcggtaaaacgtgtgtagcaagcgtagagcagaagaactgggtgtaaaggtcgagtagtagagtaagtgtaaaagggaaaggaaaggagagaaagaggaaagggatgaaatgcagagatctctagagaaaggcaagaaagaaaagaaaggaagacacagtaaatgaggcgagaaagcataggaagtgaaacggattaggaacccgtgtagtctatgcagtaaaagaaagaatgagtaagaaaaaagggagtcattccaccagggggagtaaaggcgcaagaaagaaacccaaagcaatttagaggagaaccggaaaaaggggtggatcacgtaaattaatccgatat

SEQ ID NO: 481 - DNA, 425 bp, Cyanidium caldarium
  Clone ID: LIB190-009-Q1-E1-H8
actcctctgcgatatgccagccttgattatcaccacaaatgcgtctttcacggacgaggtactaaaagaacttttaccacaactctccaaaagtgtggcagaagccttacataaaccagaacattacatgtgtgttggggtcacaaaggcttcaatgatgatattcgggggctccgatgagccttgtgcctttacgactttatcatctatcgggagtatcaatcgcaagtccaacgagaaagttagtgccattgtgtgtgatctcctgcaaaaatacttgaaaatagcgccttcaaggacctatattcaattcactgattcggcacctgaaaactttggacacaatagttctaccttttaatcggatattccgtttgtaatgtcgtccgttgtgaaaaaaaagtgtgttttgggttgtgcattgg

SEQ ID NO: 482 - DNA, 388 bp, Cyanidium caldarium
  Clone ID: LIB190-010-Q1-E1-A1
cccacgcgtccgcgctacaaaggaccgattgacgatgcggttttctctataaccttgatttttgctcagtatttttgggccaatcaattatatttgttgtgcacctgtagctctcgtaggattatttggtgcagcggtagattttttggttgtttcaatggagtgtttgtcaaaggcggagcagtctgcgtggcttaaaaccagttacggagacgagtactatactcgaaagagatccacaacgaagaaagaactgtttctatttacctgtttcaatgaaagtttcggatgacgccacaaagctacttgttgtgacgggaaataatcttgaactcacagaagcgttgcacaagtatgttgaagaaaaagttaggaaatccatttcaaa

SEQ ID NO: 483 - DNA, 310 bp, Cyanidium caldarium
  Clone ID: LIB190-010-Q1-E1-A10
cccacgcgtccggttgttgtagtgtacgagggttggtcatttgttgagctgaagagtcaatgaacaagcttcagttgctatacgtaaccaaacaagctgtttcaaaagcatggcaaagagaacagaaaaggttatactccgagaagaaatcagttgcagaaggaactttgggaagcaagtggaaggaaagagaaactgcacaagagagcgcgtactttaatcgtgaagatgagcaggcagtacaaaggttagcagcgaaacttcggcagcaaattgagccatcggaggaagtactcgcccaacaaagaaa

SEQ ID NO: 484 - DNA, 436 bp, Cyanidium caldarium
  Clone ID: LIB190-010-Q1-E1-A11
gttcaagggtcgagggacgcgtccgagctcaacaagttatcgcacccaaacaatgtgtcaagtactataccgagcagaagatccaacaaaagtattgctctcgctatgttactgaagaagaagtacaaagcaagcagtgcatcaagtatgtatctcttcagaagatcaagtacgagtcatgctctgctcaatatgaagttcaaaagatcaagcagcaacaatgtactatgacagtctctgaacaatacatacagcccgatacttgctacaagtatgtccctgaacaacaattggtgcctcatacttgttacaagtattattctgtacccaagtttattgaaaagtgctatcctcagtatgcaacaacggagaaatgtgtagagtatgagtatgttccatatgccacttctacaccttatccatcggtatctccaag

SEQ ID NO: 485 - DNA, 390 bp, Cyanidium caldarium
  Clone ID: LIB190-010-Q1-E1-A12
accacgcgtccgcccacgcgtccgcggacgcgtgggttgactgacaagcagtgatgaggacaagtcggtggtcgcgagctgctttatcttttttgatttctactgcggttacaaagtcttatcatcctcataataacacacacgattatgtctccttgtatttcttgccattgtatcgcaactgggttcaacgcgttggaattcatagcgttccttttgtactagctaatgatactggtgactccttgaaaaaacaagaaaacgctgataaagttcacaggaagacacagaagaaaggctccacaacggattccaaacaagtaaaaaagggcatcctcgagtcgcagccggaagatggtgcggaaacagacgttaaacctcctccaaaag

SEQ ID NO: 486 - DNA, 379 bp, Cyanidium caldarium
  Clone ID: LIB190-010-Q1-E1-A3
gcgtccagtgaaataatatacgtattcccagaactccgcaagacagccaaaaatgtgggatttatccattccaaattaactccgtttcctgggggaaaggggaaaactttttccccagcctccgcaagggacttgtggatgggtgggccgaaaacctgtttgaatccggggggacctttgcttagggaataagctctcttcccacagggtgtagcttcgttatcgagggaattgggtttctccgttggttttcttacaacagcgttccaaggattattatcctatgcagttgcttttttacttgttccgctaggtcgttggtggtatatcgagcgcatcaatagacaacgaaggtctcgcaatacccaacgagaaaaag

SEQ ID NO: 487 - DNA, 378 bp, Cyanidium caldarium
  Clone ID: LIB190-010-Q1-E1-A4
acccacgcgtccgcccacgcgtccggtcaatgtgggtatgattaaggaggaagttgataagtttctagtcccagtttcttcccagttggatttaaaagaaaacgatatatgggcaattcagctggttgtgagtacaagttataataatgaagtttccagtcactttacggagaagcagaactgggtaatgaatacaggagtctattatgagaggcgttttgaaaagaagcgaccttcacctggtgcttggcaagacgcgagtagttccaattctgataaagaaggtctccatattggcccaaactgtcaacttgtagtttgttctgttgataacttgaaagacttcttgggtcagcaagtttatgaacaactccagaa

SEQ ID NO: 488 - DNA, 355 bp, Cyanidium caldarium
  Clone ID: LIB190-010-Q1-E1-A6
gatttggccaacggcgtcgtcgtttcccatgccaaaagacaaaaaagaagtggacaaggcaaaaaaagcagctacggctgtaaagtctggattgaagaaaaagaaaggtcataagataagaacaaaggtccacttccaccgaccgcacactttgagattgccgagacaaccaaaatatcctcgcaagtcttttcccaaaaaaaccagctttagatcaattcaaaattattcgatatcctttaacaacagagtctgctatgaagaaaattgaagatcacaatactttggttttcttatgcgacgtgagagcttccaagccacaaatacgcgacgcggtaaagaaaatgtacaacat

SEQ ID NO: 489 - DNA, 321 bp, Cyanidium caldarium
  Clone ID: LIB190-010-Q1-E1-A8
cccacgcgtccgcccacgcgtccgcttggcaacgcaaagaatttaaaagtatgacaaagcgacagcttcataaaaatacgcttgaacatcttaaacaacatcgaaccatgttccctgccatcgaagcaaggttcctgattgtaaagacacgagtaaactcagaatcgagtgttttttggacaacaaaaagttctactgagccatcaaagcattcaaaaccaaaagttttggataactttcctgtagagaccctatgaattcctggcaggtgctgttcaaaaatgtaatagaacagtttggcattgaaaccttatcatcttt

SEQ ID NO: 490 - DNA, 398 bp, Cyanidium caldarium
  Clone ID: LIB190-010-Q1-E1-A9
aagagaagagagaatgctgggtggagtagcgaaacaagagaagggaagtaaaaggtaagaaagaggaaaggtttacgagagaaggaagtagaaagaagagagtgtaaggcggcgtcataatagaaatccgaaaggagtagaagaaaagagagagaagaaagaaaagaagagaaaagccgtactgaagaccgacacaggtactcgaggagaaaggagacccaaattaaggtgagagaatggacgataaggaactaggcaaaaggatatggtatctgcggtagaacatatgaaagaagcagcaccgactgtttagcaaaaacacagcactctgcagaaaagagaaaatgtaaagtatagagtgtgcggcctgccaaatagtagagaagaaatcgatgaaa

SEQ ID NO: 491 - DNA, 381 bp, Cyanidium caldarium
  Clone ID: LIB190-010-Q1-E1-B1
gcgtcagaaaaaaaaaaaaaaaaaaaaaaaaaaaaaaaaaaaaaaaaaaaaaaaaaaaaaaaaaaaaaaaaaaaaaaaaaaaaaccaaaaaaaaaacaaaaaaaaaataataataagcagaaggaaaaaaaagggggggccccccaaaaggttccaaacttatttgccctagatggcaaattgagacccctgccaaacggcccccaaaattcatttcacgggccgtcttttaaaaacttcttgtctggaaaaaccctgggtttacccaaataaaaccccttgcaaaaaatccacttttcccaacagggtgtaataacaaaagggccccccccattgccccttccaaagaattgccctccccaaaatgggaaagggaccccc

SEQ ID NO: 492 - DNA, 406 bp, Cyanidium caldarium
  Clone ID: LIB190-010-Q1-E1-B10
aagagatggcaaggagaatattgggtgcttatatgggagatgccacagtggcaactctgttcagtatcaaaatgttgttctatcttactatcatgggtttctccataactatcttggctctcatgggaaagaactcggatggtatttggatacatagtgtgccacctgcagaacaatattgtgcatacaagtcttcattggaggtgaaccaccatggaattgcttcctattgcaagtatatcgttgccgtagctgctattgggttggttatctcgtttttccagttttgctacggtctgttggggtatcttttcaagtggcaacaaaagttgtggtatatttaagatgctttcaatctatttttctgggcttggtggttggttggtgctatcgttgctaccgctgc

SEQ ID NO: 493 - DNA, 398 bp, Cyanidium caldarium
  Clone ID: LIB190-010-Q1-E1-B11
gtccgaagagatagcaaggagaatattgggtgcttatatgggagatgccacagtggcaactctgttcagtatcaaaatgttgttctatcttactatcatgggtttctccataacgatcttggctctcatgggaaagaactcggatggtatttggatacatagtgtgccacctgcagaacaatattgtgcatacaagtcttcattggatgtgaaccaccatggaattgcttcctattgcaagtatatcgttgccgtagctgctattgggttggttatctcgtttttccagttttgctacggtctgttgggtatctttttcaagtggcaacaaaatttgtggtatattgaagatgctttcaatccatttttctgggcttggtggttggttggtgctatcg

SEQ ID NO: 494 - DNA, 344 bp, Cyanidium caldarium
  Clone ID: LIB190-010-Q1-E1-B12
gccacgcgtccgggaaaaatggtaagtcgaggagtacgcggttttcaggtgtttagtcggctgttttcatcggttgctactcgttcaacgagtattccatggatattgtagagtagtatctcgagttttactacagtgacttcgttaaaggtcacttctaagggcaacatgaatacaacgcttgtgcctcaagtattcagtcgtcgactgtttttgcaaagccaattaacgtgcaacccagactcagtcaggtttttacctgggagataagttattcctgacggaaacagtatcgactttcacaacgcgtatgctgctcaaatttcacttctggcaaaaagact

SEQ ID NO: 495 - DNA, 369 bp, Cyanidium caldarium
  Clone ID: LIB190-010-Q1-E1-B3
aaaatgggtttgaatggagtcgacaatggacgtatatggtttgatcatgtgcgtattcctcgagaacacttattggctagattctgtcaagtttctgtggatggaagttattcttcggtttataagactgcggatgagaagtttgcagcacaattgggtgctttaactggaagtcgtgttagtatttcccgttccgctatgaatcagtccatggtccaacatagggagtggaaatacctattatgaactatcaaagtcatcagatgagattaatgccaccattggctgcaacttgtattatgactttgtgtgccaatcatttaaagtctcgttatcgcaaccgagccaatgagaatttaaaggaattgc

SEQ ID NO: 496 - DNA, 377 bp, Cyanidium caldarium
  Clone ID: LIB190-010-Q1-E1-B6
cttgacagacatggaagtttcgtttttgtacgcacctatatgtccctttgcacagagaacttggatattattgaaaaagctcaaggttcctttcaaagaagtacttattgaactcggaaaggataataaagaaccctggtttttggagttaaacccactaggaaaggtgccagtcctgagggtacgtgaaaaagcagaagcctctgaaaaagaagcagttatttatgagtctttggtgtgcaatgaatatttgaacgaagtttttgcggaaaataagcttcttccacaacatcctgcccaacgagctttggctagaattctcgcaaccagagtagatggtctagtctctgctatgttcaaactactgaaaacaaacc

SEQ ID NO: 497 - DNA, 354 bp, Cyanidium caldarium
  Clone ID: LIB190-010-Q1-E1-B7
cccacgcgtccgattcttaagaaatgaaaggagaaggtggttgtgttccaccgctcaagcaacctcgcgtttctcagtttcgaccacaagacgttggtcttcctaaagactttcttttaacttcattttctcgtttaaagggctgaggatgtaaggttcctcaggcagaattagaaggtctcttgggtcgttttttgacgcaaccacacagttgtaacccgagtcaaggagttggttcggattgctctctccagccaagccaagtacctgatgtgtatttagcctctacaacagactttttctttccgctcgtggaagacccttatactatgggcaagattggagcagcgaacg

SEQ ID NO: 498 - DNA, 374 bp, Cyanidium caldarium
  Clone ID: LIB190-010-Q1-E1-B8
agcaatggcattgtggtggagaggacttgcacaacgttttacgtggttgcgctctaccaataatatcaaagagcgtgcatattccattcctagttcgttgagaaacctacactcctcgccacgtttatccgtacaaaaagaagaaagtcattcagacaccaaaggtgtaagttgtgtttgtggtctgaaaagccaagctcacttgtatttcttttagccagttagttggaaaacagtaggagcaacatttgcaataggttcaggtcttttatttttatatgcacaaatgaagaataagaaaatggaacaacttcggtacaatcaaaaggagttgggacaaccagctatcggaggtcctttcaagcttttagata

SEQ ID NO: 499 - DNA, 391 bp, Cyanidium caldarium
  Clone ID: LIB190-010-Q1-E1-B9
aaaagaccgacacaggtactcgaggagaaaggagacccaaattaaggtgagagaatggacgataaggaactaggcaaaaggatatggtatctgcggtagaacatatgaaagaagcagcaccgactgtttagcaaaaacacagcactctgcagaaaagagaaaatgtaaagtatagagtgtgcggcctgccaaatagtagagaagaaatcgatgaaagtgaaagcgagtaaaagatgaggtatagagaatggcggtcctaacagtaaggatccaaaggtagcgaagtaaatagacgtttgaaaggcgtccagtatgaaaggagaaacgagtgtagcactgtctagtcgtccaactcagcgaaacagcaataactgtgaaaatgcagtaaact

SEQ ID NO: 500 - DNA, 392 bp, Cyanidium caldarium
  unsure at all n locations
  Clone ID: LIB190-010-Q1-E1-C10
agaaactgttccacggttgataagaagcttagaaaaggaacaaatagaatatatttcttgtggttcgagccatgtttttgctatcaacaaagatggagttgcctttggttggggttgtggtcgatatcattgttttggtatgcaccaagaagtcgacttggtccaacctcaagccttggagcatcttcctgggccttggaaacagttggtttctggtggagcgcatactttaggacttacaagaggaggtcaagtgtggacatggggagtaaatcattttggttgtttaggtgttggggaacaaaaccaacaggtttttccaggagaacctaggatggtcgagaaattgttgaagattgccanagaacctattcagtggattgcagctggat

SEQ ID NO: 501 - DNA, 249 bp, Cyanidium caldarium
  Clone ID: LIB190-010-Q1-E1-C11
gtgggttgtggagtaagtgcgcttggcaacaaactaaaagatggcaagaagaatcatcggagcttatatgtctgacgctactgtagcgtctctatttagtgtgaaaatgttgttctaccttacaatacttgcgttctctatcactattggtggtcctatgggtaagagttccgacggtatttgggttcacagtgttccagcgaaagacgaataatgtgcatacaagtcctcccttcaagttaaccaaca

SEQ ID NO: 502 - DNA, 389 bp, Cyanidium caldarium
  unsure at all n locations
  Clone ID: LIB190-010-Q1-E1-C4
acccaagcgtccggtagagtaagtgtaaaagggaaaggaaagagagaaaaagaaaaggaataaatgcagagatctctagagaaaagcaagaaagaaaagaaaggaagacacagtaaatgaggcgagaaagcatangaagtgaaacggattaagaacccgtgtagtctatgcagtaaaagaaagaatgagtaagaaaaagggatcattccacaagggagtaaangcgcaagaaagaaacccaaagcaattgacgggaatcggaaaaaagggtggatcacgtaaattaatccgatgtaaaccgagaaacttacctctccaagaaggtgttgcacggctgtcgaaagaacgtgctgtgaagtgagagaacgtacgaaaaagccaagttaagg

SEQ ID NO: 503 - DNA, 386 bp, Cyanidium caldarium
  Clone ID: LIB190-010-Q1-E1-C6
cgcaaaggcgtgtccaaggcattgtgaaagagtctgtgaaaacactttcgaagccttgggcaatatttattgaagagttgaatcgtagatggcaaaaatcttccaacagacttttgttacttcttggaatttggtttggggcctttgtccttttaacaacgttgtttacctgcattcttttgtacaaggatagccacaagtcgccctcgagaaaggagaaatcaggaaataaggaaaacaaggagcaagtagttaaggagtcctccaaaagcccagcgtcgtctctaaggcatcgagttcctaaaacttcttaaggggttttgcgaagaacgcttacactttttttccttatgtagtccggatttttgcaaccgtttgacgttaaa

SEQ ID NO: 504 - DNA, 376 bp, Cyanidium caldarium
  Clone ID: LIB190-010-Q1-E1-C7
ctcgaggtttgcatgtttcaaagcaagtccaatcttttgaagaaataccgggttgtggtgtgcaatcgatcgtctccaatcatgaaatattcataggaaacttgaaatggatcatctccaaatgcggtacctcacaagaacccacaaaggattggttggataaggaatatttagaacagctacagagttggatgaagaacggaagtactgtcgtggtagctgccatagacgatactccttgcattgcatttcgcgtcgatgatgagttgagaccggaagccaaacaagttgtttcgttttttagagaaaagcacaaaatggagtgttggttagtaaccggtgataacgatagcactgcatttgcagtagccagagc

SEQ ID NO: 505 - DNA, 263 bp, Cyanidium caldarium
  Clone ID: LIB190-010-Q1-E1-C9
aaatccacaatcgggaaatcactagcgacaaaaagcaaaatgttcctttagagtatctagaacaagacacggagtaattgaaggaatggtgatatcgggcttaagtatatggtcacgtgtcatctcattgtgaacagtgggataattgtaccatacacagtataccacacgtaccgttgtcacaattcctgataggattggccaagatacctcgcggtaatttgggcaatagccaagtaaagaatcgaagctactagctccta

SEQ ID NO: 506 - DNA, 149 bp, Cyanidium caldarium
  Clone ID: LIB190-010-Q1-E1-D11
acaaagtacaagttgtattaacccaacaacattgggaaggaaacagttcgtggattattgcattgaaacgattgatagaagctggaaaaaccggtagttaattgttggataatagcatccataaactaatagtaaaataaacggctttt

SEQ ID NO: 507 - DNA, 322 bp, Cyanidium caldarium
  Clone ID: LIB190-010-Q1-E1-D3
acgcgtccatacagctatccttgtcaaacttatgagcaggtttcaactacttaccagtgtggtcagtacgagtcccaacaagtttactaccaatgccaaaagtataaggaggttactcagcaagaatgccagtacgtccaagagtcgtattgtgtcgagtatgaagaatgtcagcaagttacccaggaagtttctccttcagaaattgtctactacggtgaatcttcttctagcagtagttactactactagaacacttgtgaaatgcgcaaagtcgcaaagtagagtgttcttttttgaataaactgttactttttgtcat

SEQ ID NO: 508 - DNA, 371 bp, Cyanidium caldarium
  Clone ID: LIB190-010-Q1-E1-D8
tgcacggctgtcgaaagaacgtgctgtgaagtgagagaacgtacgagaaagccaagtgaggaaaagaaggcaagtagagggcggcccgagaaaggagagggcgtaagacgtgatacagagtaggaagaaaagagaagagagctagaaaggaggtaaaagaagagtaaaaggactagaagaggtacggaattcacgaggaaggagcgtgaaggaaggaggaatcccaagtaatcgaggaagaaaaagcttcggtgaaagcgtgaacggaatttgtacacactgcccgtcaagttctggaagtgtgctaggaataagcaggagaagtagaagagagtaggaaaagaagaaaggaagtgaagacgtaagacgtg

SEQ ID NO: 509 - DNA, 383 bp, Cyanidium caldarium
  Clone ID: LIB190-010-Q1-E1-E1
atttatgggtgtggaagaaattcaagctgtagtttggatgactcgtgaagaggaagtaaaaaaggcagtaagttttttaaagcatcctcaggtgaagcctacagcgggacagagaaaagtagattttttaagaaagaaaggcttgacggattaagagataaaagaagcgtttcaaagaactggacagatatatccagaagatagtttttctggaaatgtggaaggagagaagtggaattctcctccaaaggcaacagcaacaccggataatttaccaaagactgccgtaccaaacgagagtgtctccaatcaacaggctgcgccagcttctaagggcaaagtatattcaaacaatgttccctccaaatccaacgacagtgaca

SEQ ID NO: 510 - DNA, 417 bp, Cyanidium caldarium
  Clone ID: LIB190-010-Q1-E1-E10
aaaagtcattggaaaagtgtatcctacaagaaatatgaacctacaagttgtgtcaaaggacgaacggagccatgtcatattcgacaagttgcagaaatagtttctcaactgtttcaagtctccatcgaacaagtagccaaacaagcctttcataacaccatgaaaatattttttcccaacgagtccgaaagtggcaattatgagtcgctttttgaaactgttcgacatcatcgctcttaagagcgcgccatttctctattagcatttttctttgtctcgttgcagtttttctaagacgttggccatttgatatttcatgatgggctgtcctttgcgggttctcaaactcaactttttatgctacaaaacagaacaatatattcaacccaatagaaattgtcattattgacaactaaa

SEQ ID NO: 511 - DNA, 374 bp, Cyanidium caldarium
  Clone ID: LIB190-010-Q1-E1-E11
gaggattcgaggagagagagagagacagacagatggccaacgctggtcaagatggccttgtgcaagtcaacaaacatagaaaagtaaagagattgcaagaagataatattttgaatagagcactatcacaaccaggagatgtatttctgtgcttttgcaacatccagttgttggtgaatgcagaaagagctattataggaaatattacttgtccagaaagtatcgaattgtgtcgtctattagctggacatatagcagtttggttcgatgaacatttggatgactttcgtttggaagctatcttgggagcactattgtgtacttgttaatgtgagtggaagcgttttgaaggagaattgggggtacaagaatgg

SEQ ID NO: 512 - DNA, 384 bp, Cyanidium caldarium
  Clone ID: LIB190-010-Q1-E1-E12
cccacgcgtccgcccacgcgtccgcggacgcgtgggcaagaaaggaatgcaagtgttcgcagaaacgaagcatagttagtatcccatcgaaaatacatcgttttggcgagtcacgaagctattctcgaaaacaaagtaaacacgacatggttggaaacttgcggatgggaggtggtgtacccaaagtgccctataaagcccctggtcaacaaaattatgagtttatagatatatttaaccgtttctatagagaaagaattatttacattggtcaagaaattgacgaagatcaggcaaaccaaatcatagcgatattattgtttttacaaagcgaagacgatcaagcggaagttcagttatatatcaactgtccaagaggctttg

SEQ ID NO: 513 - DNA, 325 bp, Cyanidium caldarium
  unsure at all n locations
  Clone ID: LIB190-010-Q1-E1-E2
agcgttaaagcatgaaagaaaagaaatccgaaaaagaagagaaaaaggtaagaaagaggaccgaatcagggtaagaggtanaggagcaagaagagaagagagaatgctgggtggagtagcgaaacaagagaagggaagtaaaaggtaagaaagaggaaaggtttacgagagaaggaagtagaaagaagagagtgtaaggcggcgtcataatagaaatccgaaaggagtagaagaaaaggtccaaacaagagaagtcagcagtggggaaaattgggcaatgtacagggaagtatgacccagtaatgaggagtggagtaaacagaaa

SEQ ID NO: 514 - DNA, 415 bp, Cyanidium caldarium
  unsure at all n locations
  Clone ID: LIB190-010-Q1-E1-E3
cagtcaaggaggaaggcttttccaaagcaatcatatagaaaaacaaaagtgtatgtaatatacggtagctattctaatgtaaacgatatcgaagtattttggcggcttcacactgagaaccaganaaatgataagaaatggcgatgtccaaatcgcgcggattttttcgattcggacgactcgccaacgttccataaatcgtttctcccgtacatatcaccaattcctatctttcgtcatatttctcttcatacaaaagaaaatacgtactctgtccaaatagaatactgcttgcttccagtgtgtagtcctagcctgtggtccagtggaaaagccaagcggtttatgacagtgattgaagaacacatcaaaatgtgcaacaaatgcatgaataaaatcatttcgttcagctttc

SEQ ID NO: 515 - DNA, 367 bp, Cyanidium caldarium
  Clone ID: LIB190-010-Q1-E1-E6
tggaagcttctgcgcaagtacaagctgcacgaaagtgacgagaagacctacctgcagttgctgccaagagttgtgttcaatcaactggcgttttacttgactagttgctacataggagagaaaatgggttggatattcagaaccccttctaaagacaatgctttccaactctggaagttgcctatctatcttactttgtactctttctatcatgaaattatattttactctgctcatcgttggctgttgcactccaagtgggggtttaacctgttgggacacaacgtccatcataccaccaagggctctgttggtatttcgcaacattatatgagtgtcattgactattaattgggaatcggttttt

SEQ ID NO: 516 - DNA, 332 bp, Cyanidium caldarium
  Clone ID: LIB190-010-Q1-E1-E7
gtgcttccataggagaggtagttgtcattctgttggcgcaacttggtcataacatgtatgataggtatatctagcgaaaagctttggctgtcctacagatagaattgtattcgattcaccggtaaagactacgaaagacttgatgcaggctttgaatgacggaatctatatcaatgcagataattttcaagaacttgagaagatacaagaatgtttgaaagatgacaacaccgatgacaaaaggccaaaaaagtgcgccaaagtcggccttcgtatcaaccctcaagtaggttcaggtttattacaggaaaccagtactgctagtgcccaaa

SEQ ID NO: 517 - DNA, 408 bp, Cyanidium caldarium
  Clone ID: LIB190-010-Q1-E1-F11
ggcagttgtaggataacttgcgtgtttctcgaaagtcgatttgtattatggagcgttattcaaaagaacagtgtttgtgtgtccactactttaaataatagaaactggagaatgcaaaataacaacgaaaataactcacctaaaagatatccttttgaagacgagtggagagaaaagttgaatagaaagatgaaacaggaaaaaatagctcgacaagttatgtctcaagtgcaagagttgagatggaaagaaagtttggaggggtacattgagaacgaagtggaacatattcgaaaccacgtcagtaataattttcgttatcatcagccacaaattatgaacaaaggtgttgaaactgcaaagcgtgttagtggcaactcagttgcttcgtggaacaaacaaattttt

SEQ ID NO: 518 - DNA, 390 bp, Cyanidium caldarium
  Clone ID: LIB190-010-Q1-E1-F12
agattgcaatatcacactgtgcaagcgctttatgaattgcatgttttttgagatcacacaaacacttgtacactgaatgaacgacgtatgggtactaactgtgcattttgtatagatatcaaggatgtcaaatatgttatcaactacgatttcccgaatactatagaagactatgttcatcgcattggtcgcactggtcgtgctggtgcccttggaaagtcccatacgtttttcactccggataaattccgtgttgcgaaagaattagttaacttgttgcgagatgctggacaggacattcctcccgagttggctcgtttgataaaaacttcgtcctttggcggtaacaacagaaacttttctcgttatcgaagttacaattctccgggc

SEQ ID NO: 519 - DNA, 386 bp, Cyanidium caldarium
  Clone ID: LIB190-010-Q1-E1-F2
agcacgacaagggcgacagtctggagtcgctactggaagacttgtggaaaactcctctttcagtggcttttccaaaaggacagttggaaagggcaacgaaatataagaatggttacaaacccaagatgtccagcaagtttccctaataaaagtggctcagatgccggataacgaagacagtatttcaatagttcactttgacgaaaagttgcttaaaaaggcattccttcctaataatgtatccattttagagcctttctggatacaaaaagaacagcctttgcacattgcttcccacttgaaaaatgcccatattagaaagatcaaaaggaagagacaagactccagtcctactgatatccaagtatacgaacaaaagaagaaaa

SEQ ID NO: 520 - DNA, 105 bp, Cyanidium caldarium
  Clone ID: LIB190-010-Q1-E1-F3
aaagaaaccaactgggaatcccccaataacggggaaccaaaccggaaaaacccaacaaggaaaacccccttttcctttgggaaaaaaaggaaatttatttgaaaa

SEQ ID NO: 521 - DNA, 347 bp, Cyanidium caldarium
  Clone ID: LIB190-010-Q1-E1-F5
agtgctacggagatactgaatgattcgttgttttattatcagcggcgaggtgtcagtggcaatgatggcagtagccaatgcgggaggaaaatgacgtgggaacgaagtgtcacggatatgtcaccgatgatgatgatgactcgtagtgctattgctgcttgtggtcgtagtagcagtggttccaaagaggaggaagacaacaacaacaacagtactagtacaagtagctatcctagttcctcagccatttccagtttttatcgcaataatgttgtcgttcaaagaaattctccatcaggaattccaaggcatctagtggtgcaaaatcaaacaaaggaacctactcc

SEQ ID NO: 522 - DNA, 420 bp, Cyanidium caldarium
  Clone ID: LIB190-010-Q1-E1-F9
accacgcgtccgcggacgcgtgggcggaaacacgctcaatttacggccgatatacgacagtgttttgtgtgaacatatactaactcgactttgggtatccaaccaatatatttctaatctctcctatacactagttttagttgtatgagtggaatatatatatatgtagttatctccttgtaacattcgttggaatatctcagataatacatgccattggactgctattttcagcgagaaaagtatacatttctctccacaagaacgcagcatgtttcatcctcggaatgtacgtatatctggagatatgcttacctcaaatagaaaccatcgtctgccttccataaacagtcactgttcttcttcttaatgacagaaacttccaagtgcccttcgataggttcaggataaacatatttc

SEQ ID NO: 523 - DNA, 377 bp, Cyanidium caldarium
  Clone ID: LIB190-010-Q1-E1-G1
gaggaattcgggaggtgaaaagatggtgtctattatgctttatttattctcgatgcagcagtcgatgaaggctcctttcacccttgtcgatgaaatgaaccagggaatggaccctacttttgagaggaagattgtttccgtcatgattagtgatgcacgacattccacaagttctcaagtgtttctcatttccccgaaattgctcactgatctagagtttggaagagaaacgaaaacccattttattttcaacggcccttgtgtcagtaccaaacaggattgttggaatcagttgctgtcaaagtatatagaaggatagttgtgaattgttttggttttaaatggtaccgtaatatcctttgttttatatgaattgt

SEQ ID NO: 524 - DNA, 357 bp, Cyanidium caldarium
  Clone ID: LIB190-010-Q1-E1-G10
cccacgcgtccgcccacgcgtccgaacaactgcggatcgtgctagagagagagagagattgtgtgtggatagttggtcatgaacgaagaaatatctgcagataatccttatagtagactagtagctttgaaaaaacttggtgttgtaaaaaactttgacgaaattagaaagtactctgtagcggtggtagggttgggtggtatcgggagtgttgctgcggagatgctcgttcgttgtggaattggaaaactaattctttttgattgtgacaccgttgaattggccaatatgaatcgtctcttttataaaccagagcaacgagggaagacaaaagtacaagctgcgaaagaaacgttg

SEQ ID NO: 525 - DNA, 72 bp, Cyanidium caldarium
  Clone ID: LIB190-010-Q1-E1-G3
cccaagcgtccggaaggcgcaaatttgtgggtggtgtccgaaaacttttcaaccttgggaaaagtccttaaa

SEQ ID NO: 526 - DNA, 315 bp, Cyanidium caldarium
  Clone ID: LIB190-010-Q1-E1-G5
aaaggagtagaagaaaagagagagaagaaagaaaagaagagaaaagccgtactgaagaccgacacaggtactcgaggagaaaggagacccaaattaaggtgagagaatggacgataaggaactaggcaaaaggatatggtatctgcggtagaacatatgaaagaagcagcaccgactgtttagcaaaaacacagcactctgcagaaaagagaaaatgtaaagtatagagtgtgcggcctgccaaatagtagagaagaaatcgatgaaagtgaaagcgagtaaaagatgaggtatagagaatggcggtcctaactg

SEQ ID NO: 527 - DNA, 354 bp, Cyanidium caldarium
  Clone ID: LIB190-010-Q1-E1-G7
atgaataatcaacactgagcgaataggcctaaaagggagcaagcaaataactgctacgatgagctgagaacagcttaggatcacgtctattgcgttcaagcgttgctatagtctcaacccaagctcaacaaaacccatccgttttctcgggatatagtagaatacaacggggatttctcaaatactttatacgagccttcgggtctcattttcaaatcttgtgggtcgcgagcccagcgagaaccaggcgtgaacgctagggaagcattaagagatgagatagctagcatggttatcccaacacatgcgttgagttacttgaaaccacttcagagctgtttcaacgacagtttt

SEQ ID NO: 528 - DNA, 216 bp, Cyanidium caldarium
  Clone ID: LIB190-010-Q1-E1-G9
gtccgacgtctaagaggaaggcttttccagagcaatcatagacaaaaacaaagctgtatgtaatatacggtagctattctattttaaacgattacgacgtattttggcggcttcagactgagaaccagcatagtgattttaaatggcgatgttcaaatcgcgcggcttttttcgattcagccgacgtcgccaggttttataaatcgtttccctccg

SEQ ID NO: 529 - DNA, 402 bp, Cyanidium caldarium
  Clone ID: LIB190-010-Q1-E1-H1
attggacgttgggatggacaaggctcgacaggtgaaagcttccgagttttgggagttgttccactacttgaaagggttcggagacaaaagttttctggtaactggacaactcatacaagattggcaacgaggcactattgaaggtcgctggtgggaagatagatggccagaaccacaactagtcgtttgttttcgaggaggaatcactcaaagtactttgataatcttctcgataaactgtgacacggcctttcatgtactttcacaagttcagttgcatcctggtttcttattttttgcagtaccggatagcgttgttccgtccattgagaaagtttcctcgatgcagaattattcactaaagtttgaaacttgctacacttatgtgttgggaaacacaaa

SEQ ID NO: 530 - DNA, 395 bp, Cyanidium caldarium
  Clone ID: LIB190-010-Q1-E1-H11
acgcctgcagtagccgtccgaaattctagggtgattgggttactatagattgcaatatcacactgtgcaagcgctttatgaattgcatgttttttgagatcacacaaacacttgtacactgaatgaacgacgtatgggtaacaactgtgcactttgtaaaaaaaacaaggatgtcaaataagttatccactacgatttcccgaatactatagaagactatgttcatcgcattggtcgcactggtcgtgctggtgcccttggaaagtcccatacgtttttcactccggataaattccgtgttgcgaaagaattagttaacttgttgcgagatgctggacaagacattcctcccgagttggctcgtttgaaaaaaaactccgccctttggcggtaac

SEQ ID NO: 531 - DNA, 392 bp, Cyanidium caldarium
  Clone ID: LIB190-010-Q1-E1-H2
gcgtccgcccaagcgtccgattccacacaggagtatttcgaggaggctttccagttgtgccagttgtgatcaaataccgatatcgcaggttttcccccacttatgaaactatacgcttaccatattacattttcaaactgtttacgcagttgtataatgaagctgaatatactttgcttcctatttattatccaaatgaagtagagaagaaggaccccacattatacgccaataatgttcggcaagtgaaggtaatagcttgagtctcagtgaaatgattttgctgttttgtaggaaaattatgcaaaaggaactgaactgttccttatctgaaagttcatatcaagataagctcgagtatcatagattgctacggggtcaatgcaagaatc

SEQ ID NO: 532 - DNA, 233 bp, Cyanidium caldarium
  Clone ID: LIB190-010-Q1-E1-H3
cccacacgtccgccgaacgaatcaagaagaaactttgggggtaacaagttaatgtggtgttaaaaaacctttcaagcaacaccaatggcacctccaagtccggtcaacaaaacctaaggcaaaaaaaggtcctaaaggttttgccgttccccaaataaaattggaacttaaccgggtttaaaaacttcttaaaacatttcggccccaaccccctgctaaaggaaggaaaacct

SEQ ID NO: 533 - DNA, 373 bp, Cyanidium caldarium
  Clone ID: LIB190-010-Q1-E1-H6
ggcagacgtacgcgtcagcccacgcgtccggaaaagtttttcacggcagcgaaggaacgtagtaaaccattggagtcgctcttccaaagccggacgtcagtttccagttgggcgtgtaagtacattcttaaagaatggtaactatggagaaagagttggagctggagcacccgtgtatttagctgcagttttggaatatttgactgcggaagtgttggaactggcaggcaatgcagctcgtgataacaagaaaacccgtgtagttccacgtcacattcagttggcagttcgtaacgacgaagaacttaacaagctgttgggcggtgtgactattgcttcaagtggcgttcttcccaacgtccatcccaatctg

SEQ ID NO: 534 - DNA, 344 bp, Cyanidium caldarium
  Clone ID: LIB190-010-Q1-E1-H7
cccacgcgtccgagagaaggaagtagaaagaagagagtgtaaggcggcgtcataatagaaatccgaaaggagtagaagaaaagagagagaagaaagaaaagaagagaaaagccgtactgaagaccgacacaggtactcgaggagaaaggagacccaaattaaggtgagagaatggacgataaggaactaggcaaaaggatatggtatctgcggtagaacatatgaaagaagcagcaccgactgtttagcaaaaacacagcactctgcagaaaagagaaaatgtaaagtatagagtgtgcggcctgccaaatagtagagaagaaatcgatgaaagtgaaagcgag

SEQ ID NO: 535 - DNA, 168 bp, Cyanidium caldarium
  unsure at all n locations
  Clone ID: LIB190-010-Q1-E1-H8
gaaagaaaagaaagggaagacacaataaatgaagccaaaaagcataagaaattaaaacggattangaacccgtttagtcaatgcattaaaggaaagaatgattaagaaaaaagggattcattccaccaggggattaaaggcccaagaaagaaacccaaagcaatttac

SEQ ID NO: 536 - DNA, 271 bp, Cyanidium caldarium
  unsure at all n locations
  Clone ID: LIB190-011-Q1-E1-A1
cggacgcgtgggcggacgcgtgggagcttatgaagctctaggagactttggtatggaaaatgataataacgagcaagcagcagaagacttcaaatcggctgtgcgttgctacgaggaggctgggtatgctttgtcgagaacagtcggagggctttatcatagtatttatcttgcacttcggtctattgacncacacaatgcaaggaaatatttgaagcttgccgcacaggtggtcgagaagcgtatatcagagagtcagaaacaggaaggt

SEQ ID NO: 537 - DNA, 374 bp, Cyanidium caldarium
  unsure at all n locations
  Clone ID: LIB190-011-Q1-E1-A10
gaaagaggcaaatacgggaaagcagtaaaagaagaaagagaaaggaaaaaactgagtatcaggaagaaaagagggagtagatgaggaaagaaagatcaaggaagtaagagtaagagaaggagtaaaggcgcaagaaagaaacccaaagcaattgacgggaatcggaaaaaggggtggatcacgtaaattaatccgatgtaaaccgagaaccttacctctccaagaaagtgttgcacggctgtccaaagaacgtgctgttaaatgagaaaacgtacgagaaagccaagtgaggaaaagaaagcaagtagagggcggcccgagaaaggagaaggcgtaagacgtgatacagagtaggaagaanagagaagagagct

SEQ ID NO: 538 - DNA, 343 bp, Cyanidium caldarium
  Clone ID: LIB190-011-Q1-E1-A11
agtgaaacgagttggcaatgagtgagttggtgcgacctggtcgtttctttgatagcggctttggtgacttattttcttggacgaatgaccccttcttccgtgatgcatggaacttgatacctcgagtaggtggagctgagtctcagttatggtcgccgagaatcgacctcattgataaagaagacgcgtttctggtgaaagctgaggtacctggagtaccgagagaaaacattaaagttgacttgaaaggggatatcttgagtgtgtctggagaaaaggctgacgaaaaaaagtcggatgaagaacgagaaggaacggtattccataggatggagagaagcta

SEQ ID NO: 539 - DNA, 423 bp, Cyanidium caldarium
  Clone ID: LIB190-011-Q1-E1-A3
gtcgagggacgcgtcagcccacgcgtccgcccacgcgtccggcagcacaagctttacatggagacatcacgcaaaaacaaagggaaatcacgctttccaaatttagagaaggcttattccaggtcttaattgccactgatgtagcagcacggggtttggatattagtggcgtcgatttagtgattcagtatcgtattcctgaggacattgatatgtatatccatcgcgctggtcgcactggcagagcaagaagacaaggaacttgtgttgttttgtatacggatgaggagcgaagtaagctgaatttgatgcaaaacgtttgtaagatacgttttcgtttagaaagtcctccttccgtgcaacatgtgatagagactaaagccaaaagtctcttgcgttccattcaagccatcgatacgaaaa

SEQ ID NO: 540 - DNA, 168 bp, Cyanidium caldarium
  Clone ID: LIB190-011-Q1-E1-A4
cgtccggaatgcgcagctttagtcaatgtcgcaagtcgatcgatattctaaaaaacaactatacctgtcgtacgttggagcaacatagcgaactggcacaaaacatagcgttgcgtcaagtctcgaaagcagagtttcagaaatccgaagacagtccttttgatgcca

SEQ ID NO: 541 - DNA, 216 bp, Cyanidium caldarium
  Clone ID: LIB190-011-Q1-E1-A5
ctcacgcgtccgaactgtcctcacgagaagaataaggagtacagctatccttgttaaacttatgagcaggtttcaaccacctaccagtgtggtcagtacgagtcctcacatgtttaccaccaatgccggaagtctcaggaggtcactcacctggaacgctcgtacttccaacagtcgcactgagtcgatgtatcaagagtgtcttcaagttaccca

SEQ ID NO: 542 - DNA, 64 bp, Cyanidium caldarium
  Clone ID: LIB190-011-Q1-E1-A6
acgttctaaaaatgtacagttgctgctcaagaacaagaaagcttcccttgaattttctctggac

SEQ ID NO: 543 - DNA, 304 bp, Cyanidium caldarium
  Clone ID: LIB190-011-Q1-E1-A7
gctttacatggagacatcacgcaaaaactcacgtaattcacgctttccagatttacataaggcttagtccaggtcttaattgccactgatctagcaccacggggtttggttattatcggagtccatttagtgattcagtatcattatccttacgacattgattcgtatatccatcgcgctggtcgcactggcagagcaggtaccactggtacttgtattgttttgtataccggtcaagaccaacttttgcctgattttgtgctaaacgttttgtccgataccttttcgtttagaaagtcctcct

SEQ ID NO: 544 - DNA, 405 bp, Cyanidium caldarium
  Clone ID: LIB190-011-Q1-E1-A9
cgagttgagaaatatcgaaagtcggaaaacggtgaagaagaagctcagaaagcaattggcaagaataagaactttttggttcacgttgccaacgaagcatgttcgcgtagataaattgtcggcatccgtcaaacactagtgaagcgtataccaattttagtaaatggaaataacttgtggagagactcatcttgatgaaaacaacttgctctccagatgaaattaatacagggtgttgtatttcaaacacttgagtcatataggaacgtttattcgtaaaacatatacgatgaatgttttctagtcgtcttttatgttgtggtagagtagtgtgatttgtactttcctatgaataggccaattattgccttgttctttctaagagtcgttttaatgttgtgcata

SEQ ID NO: 545 - DNA, 383 bp, Cyanidium caldarium
  Clone ID: LIB190-011-Q1-E1-B1
caggactgtttggatcatgtcatccagattatcgatattctagaagtgtatcgtgatagtgcgcttggtttggttgatatctatttgagtggtgttagtcataatatgcaagaaagtaagtccattattgtatagataccttactgtcttatgtagttatgaaaacgctgactattataagtaccatatttattccactaacgtttatggctggtgtatacggaatgaatttccctcgaatgccagaattacattatggatatggatatactatcttttggtacgattgttgttgaagagtttctcgtacaagtatatacatgattgagaacggaacataagttgatggcacttgtcatagttgggcttgaaatatttatttt

SEQ ID NO: 546 - DNA, 412 bp, Cyanidium caldarium
  Clone ID: LIB190-011-Q1-E1-B10
gttgtctactgctcgtcatttcgtaacggtggtcggctttttacgacgacgtggtggttgcttcctgtcgaaacctttttgtactagagttgaagaacaaggaaaacttatagtatccgaaaccgaagatgatacccgattagatcgtttcttgagacgccgtataagtagattgcctcagtctttattagaaaaatatatccgaagaggagttgtaaagatagatgggcaagtagtaaagaaagctggggaaagagttcgttcttcttccgtggtgtatattcctagacaactagaaagcttggaggaaaacacaggggacgacaatgtggagaatagtcgtctccctcagggggatggcgctatgatgatggacagaaagaaaactaccttgtctacccaagtaacaaat

SEQ ID NO: 547 - DNA, 392 bp, Cyanidium caldarium
  Clone ID: LIB190-011-Q1-E1-B11
gaacgcacgtttaaatagggctcagaatagacacagtacttcaaaaagtgaccgagttttgttggatgcgttttctttaataagtcagttcgcggaacgctcttccctgtctcagagagtagtggacagagcacaggagttgttcaaaatgtatttcgatcaacttactttgaaccctcgaggtggtagaactcgttatttgaaagaacacgaaactactgcagttgctgcagcatcgcttcagtgggcggcgcatattgaaggagttcctaggagcttcaaggaaatgacgagtacgacgcaagtacccaaaaagactctttcagatacttatctgaaaatgacacaaagtctcaaactgaatcagcttaataagagtacggaagacttta

SEQ ID NO: 548 - DNA, 408 bp, Cyanidium caldarium
  Clone ID: LIB190-011-Q1-E1-B12
ctttgatcccactaagtggaccttgcgtttcttgagctggtttggtttggtgaagcgcttagttcgcttttcgaagaatgaggtgaagaaggcgaggttacaagttgagcagcagaatcttgaaaagcagatgaaacagttggattggggaaagcctcttgaaagtcttccagagatgacctgggaagatattgaagcacaagtagagaagggtttatatcttgttgttatcgatggactggtatataacgtgaccgattttcctccgaattcacctggtgggaaaaaggatattgaatttctggaaggtcccgatgctagccgtgcctttaaggaagaagtttaccgtcatagcaaggctgcaacgaatttgatggcacattatcgttatgcaaagttggttgagaa

SEQ ID NO: 549 - DNA, 355 bp, Cyanidium caldarium
  Clone ID: LIB190-011-Q1-E1-B2
cccacgcgtccggtgtttccaaagctggactccatatgttgaccaaaatgatggctttggaatggggtccttataatattcaaaccaatgccatcgctcctaaggtaatgtggaccgaaatgggacagcgcgtgtggggtgctcctgagaaacacgaacctatgttggcacgtattccagcccatcgttttgtaaaaccggaagaaattgcagaattgaccgtatttttggctggaccaggctcggatatgatttgtggacagactattgccgtggatggaggattaactgtgcattgactgaggatagactggagcaataataataaagaatatcaggaaatgtttgtatggat

SEQ ID NO: 550 - DNA, 309 bp, Cyanidium caldarium
  Clone ID: LIB190-011-Q1-E1-B4
acccgtccgaagtcgcatgggggttgttgtggttgcgaaatggtgtacagtcgtttgtccttgtcgtgtcacgctcgatttactttgcagtgtatcatggcttctagatcttggaacatagtttaggtgtacgactagtgtaacctttagcagggaagggtttgtacatgttagccctcttttcatacatatgaacattctcgaagagtgtaagcagagacccagttgtaaagactgttgcgtcttcacataacggaccaaagttcgttgatcttagattctccaagttttcacggggcgaacgagttt

SEQ ID NO: 551 - DNA, 360 bp, Cyanidium caldarium
  Clone ID: LIB190-011-Q1-E1-B7
gtcccacattccgcgtccacccacgcgtccgaccacgcgtccgcaagcattcaagcacctcttgaatggatatcatttctatggacaaggtataagaactaaagtcactggacaattccgtggaacaagactgcaataaattttttgagaatggaaacaagtcacctggacttagagcaagagagaacttgcacgacatcatacaacttgctcaagaactacgcatagagatataagcgacgaaacaaactgaaaagtgatactttcaactgtgcagaatcaaccatggcttgtgaaactattccagtttttgaaataaaaaccttttttcctttgtaacccaagaaaaacaaactttta

SEQ ID NO: 552 - DNA, 94 bp, Cyanidium caldarium
  Clone ID: LIB190-011-Q1-E1-B8
gaaagaggcaaatacgggaaagcagtaaaagaagaaagagaaaggaaaaaactgagtatcaagaagaaaagaaggaataaattaagaaagaaag

SEQ ID NO: 553 - DNA, 381 bp, Cyanidium caldarium
  Clone ID: LIB190-011-Q1-E1-C11
cggacgcgtggggttttttgagatcacacaaacacttgtacactgaatgaacgacgtatgggtactaactgtgcattttgtatagatatcaaggatgtcaaatatgttatcaactacgatttcccgaatactatagaagactatgttcatcgcattggtcgcactggtcgtgctggtgcccttggaaagtcccatacgtttttcactccggataaattccgtgttgcgaaagaattagttaacttgttgcgagatgctggacaggacattcctcccgagttggctcgtttgataaaaacttcgtcctttggcggtaacaacagaaacttttctcgttatccaagttacaattctcggggcggctcattttcaaataatgga

SEQ ID NO: 554 - DNA, 105 bp, Cyanidium caldarium
  Clone ID: LIB190-011-Q1-E1-C3
gatgtatgatgcaggcaaagaagtgacgcagtagatcagagagtaacacatgcaagtaggtaaagcgaacgggtgagtaaagaggtgtgaaagattggaagacca

SEQ ID NO: 555 - DNA, 175 bp, Cyanidium caldarium
  Clone ID: LIB190-011-Q1-E1-C8
cgaaaaatgatctcttccagaacatcaacgtttgctatttgctgtaaagcaactagaagatggtcgtactctttcagactattatattcacaaggagtctacgcttcacgtggaagtgcgtctgaggtgtagttgcaaaatatttcagcctctagtttactttaccccttatttt

SEQ ID NO: 556 - DNA, 408 bp, Cyanidium caldarium
  Clone ID: LIB190-011-Q1-E1-C9
gcaggatatgttacaaaatgttccggtgaaggtatttactttgcagcgaaatcgggacgtatgtgtgcagaagctattgcggagatttctttacaaggagaaagaattccttccgaatccgaactgaaggcgacttatctgaagagatgggatagcatgtattggtcgacttacaaagtattggatgtattacaagcagtattttatcgcaataatattgctcgggaagcatttgtggaactttgtgaagatgaatatgtgcaaaagatgacttttgattcctacctctacaagacagttgccacaggaaatcctttgcaagacgtaacactagtgtttcatacattgggagcttttgcaagagcacccgctttggcaccttgaaaataaaaaagtgtgtccttggtg

SEQ ID NO: 557 - DNA, 418 bp, Cyanidium caldarium
  Clone ID: LIB190-011-Q1-E1-D11
ttctgttttcctattggcgtcatgtttgtaacgttatctcctgcagctgaccgtatagttggtctaggaaacaagagagctttatgtttgcaaagtaaaaataatagaacaagtttaaaaaggccaatttcgtcttctagtcaacttttgcgaatgactggagctacttcctctgcttccgatgacagtgttccagatatgggaaagagaatgttcttaaactatgtcttgcttggtggtgcttccattccaatcttatctatgttgggtggttatgcatactttttctatccaccctctcgtggtggttcgggtacaggtactgttgcgagagacgtgttcggacgagaaataaagaaaaaggaatttttggaaacgaggaaaccaggcacgcatgagttggtacaaggacctaaag

SEQ ID NO: 558 - DNA, 193 bp, Cyanidium caldarium
  Clone ID: LIB190-011-Q1-E1-D3
gagccaagaaactatggacgcagaagaactgcagcaaagaaaaagcttgaataagacaaacgcacagaggcctggagccgctgccgcgccctctagctgaatgtgatggcaccaagtggagaacaagtaatatgttgtgttgactgtatattctttcgctctgataaattgtcaacacgtgttatttgtccgc

SEQ ID NO: 559 - DNA, 378 bp, Cyanidium caldarium
  unsure at all n locations
  Clone ID: LIB190-011-Q1-E1-D4
agtagatgaggaaagaaagatcaaggaagtaagagtaagagaaggagtaatgtgaatgaanagcaggaaagtatttgaaaaaaaaattgtaaagcgcgtacctttttgcaaaaatgtcccagccgagtgaaagaggaagcaaaaagaanagaaaaaaaagtagccacggtaagacccaaagccagttgatcttaggccgtccaaaccaagtaagggtgaaccagtaactgtggaaaaagatttggaagaaatgggataaagggtgaaaagccaatcaaagctagtgataactggtactcctcgaaaagctatataagtagcgtatgcaaggaaagaagaaggtaaaggaagagaaggaagaaacaaagagggactatg

SEQ ID NO: 560 - DNA, 71 bp, Cyanidium caldarium
  Clone ID: LIB190-011-Q1-E1-D6
acccacgacatccgcaggacgctgtgggtcaacccggcgatctctgcaccggtcccatgctatgtgtacca

SEQ ID NO: 561 - DNA, 373 bp, Cyanidium caldarium
  Clone ID: LIB190-011-Q1-E1-D8
caacaataaacaaaattccccaatttcccttccaataatttgaatttgccaaaaatccatttgcaggacctctcaagaaccccaaaaaaccttcaacggtaaaaggatacagcattcactatactcaaacctacactaccgattataccccaagctatagtagtgaataaacccctagctataccagctccaatagtcaagtttattcttccccttaccaatcctcatacagtcctacctatacaacttatccatggattcaaccttgtgctcaagcttgtgcgggatgccttaattgcaatcaacagtacaatttcaactatccctatggtcttgataacctccactgcaacaactttgacaaatactgccc

SEQ ID NO: 562 - DNA, 385 bp, Cyanidium caldarium
  Clone ID: LIB190-011-Q1-E1-E10
gacgaggatacccgctgaacttaagcataacaataaacggggggaaagaaaccaactgggaatcccccaataacggggaacgaagccggaaaaacccaacaagagaaaccccctttttttaacgggaaaaaaagagaagtatttgaaaaaagaacagaaatatctgcagcaagaaaagaacaaatttcctggaatggaataacatggagggtgagaatcccgtttatcccttttctttaaattcaagctgcgttacgatatttcttgttgtggagtcgggttgtttggtagtacagccttaattttgtgggtgttataaatcatccaaggctaaatacgtaaaccgagaaccttacctctccaagaaggtgttgcacggctgtcg

SEQ ID NO: 563 - DNA, 398 bp, Cyanidium caldarium
  Clone ID: LIB190-011-Q1-E1-E11
gtatttgatggagaaggcggataaggaaagagaaggtcgaaagattccgcgtgcaaatattttaagggatccttttgtccttatcaacttgagacactattgcatgcttgcgcatggggcttactcggaaagtgttaccgatatttgctccaaaacgccactgatggaaagtgacattgttcagtttcaacttgtatccaaacaagaacaaccagcttattatttagcagtagatcatttgacgagaaacattgtattgtctatttgtggaacgaagagcttccaagatgttcttaccgacgttaatgtagagacgacagaatttttggacggttatgcaccaaagggaatggtagcttctgtatattggttacaaaatcaagttttgcataacatct

SEQ ID NO: 564 - DNA, 409 bp, Cyanidium caldarium
  Clone ID: LIB190-011-Q1-E1-E12
cccacgcgtccgacaagacaaagagtggataatatgttacagcgagtacacaagctgacgagcatcttgtcctttttatactcgggcgaacaaccgagagtggactatatcgttgctgaggatgaagcaagttgggaaaagttgtggagaggaaaacgcgaggtcattggatatactttggaagcagctttacagaaaacttgtattgtggaaaaccagttgagggagtggaaaaagaaactcgatagtctagcagacaattattcgttgggtacgagagcctatgatgcgagaatgtggtcattggacctcatcgcaactattatgagtgtctgttttgcagtttttggaatgttttcacaattctttggttattatgttcaattgcccatttacaatatgggaaatg

SEQ ID NO: 565 - DNA, 427 bp, Cyanidium caldarium
  unsure at all n locations
  Clone ID: LIB190-011-Q1-E1-E2
gcacaacattgggtttgtctctgtgctccataatgaacaagcgcatttgtcggaatccagtagttgtggaaaactaccttttctgtttggaaaatttcaacttggtacttgtgaggaaccaanaaacaatgatacatatttcgagagtttattagagaataatgcaacgccatttgaccgcatggatgtcttagacattgtaatgttttgtagcttgagtggtgctattataggattgcagctttattgtttgtcgcactctgtcgatcttccctttcgttttgttgcacttggatgggtttttggcgtangaggtctaatagtatatccttatagtggaaaattatggcagtatctgcatcgaacttcttggcttcgagcactgttctcagaacaagcaacattttcatagaaacagaggaagaat

SEQ ID NO: 566 - DNA, 317 bp, Cyanidium caldarium
  Clone ID: LIB190-011-Q1-E1-E3
gaaggagactttgaaggaaagcttcatacagatattgagcttttggaagataacacaatgaggagtttggttcagcaatatgccaatgaccaacagcaattctttaatgacttttctgaggtgtttggaaaatatatttctagaattcattgcaatcaaacttccacaggaccttgtccgttggatgacatcggtgtaccaacgtctgctgctccatcaccgcagtcggctgttccttcattttcggaacctagtttcggggcccccttctgggactagttttccaaacttttgatggtgagccctcagctcaatca

SEQ ID NO: 567 - DNA, 419 bp, Cyanidium caldarium
  Clone ID: LIB190-011-Q1-E1-E7
agaagatgaactgttgcagaagggaaagaacttgttgctggaagttattcgtgttccttacatcagaagagctcttttgataggaatcatggaaatgctgttccaacaaatgagtggcatgaatgtgtttatgaattatattgatgaagtctttcaggagaacatcaatatggggccaagaacttccgtagctataagtttgttcccaggtttcgtgaatatggctgctacggtcattgtatactttaccatcgatcgatatggaaggagaacattgcaattggttactttccctgtaatgtttctcatgttattgatggttctgttttccttttacggagataagaaagtgaatttagccttctttattatcggagttatattctttattattgcctatagtcctggtgctggtcctg

SEQ ID NO: 568 - DNA, 387 bp, Cyanidium caldarium
  Clone ID: LIB190-011-Q1-E1-E9
acaagactctaaagtgagtcgtagtaatgaagacccatggtccggactaggcatcagagccttgtactgttcaacaacactggcaaatcagtaacagagattgcaaactcatagtatttggcgcgagtcacggtcacagtcagtgaatctcatgctgtgcatttgcaacatccagttgttggtaaaggcagaaagagcgattataggaaatattagctgtccaaaaagtatcgaattgtgtcctcgattagctggacataatagcactttggttccatgaacatttggatgactttcgtttggaagctatcttgggagcactattgtgtacgtgttagtgtgaattgaaacgttttgaaggacaattgggggtacaagaatggaatg

SEQ ID NO: 569 - DNA, 410 bp, Cyanidium caldarium
  unsure at all n locations
  Clone ID: LIB190-011-Q1-E1-F11
ctctggccgtctacagattttttctgacatactattggaaaaggatttcacgtattagagcatagtgaaattttggactgtacagttttcagttattcaacaagcaacagactacgagtttgtcgttcttgtggcacgaaaaagcctctacgatataatcacgtattcatcgtgagcacagaaactaactaacgcagttgagaatgtcttatttttgggctacagtagaagccggcttcggaccgagcttcgaagagcaagactgtgattacaatcaaaagaacacaaggttcaactttcgagctcaaatgcttacttttaccaaccagtcgcccaagatttatgtntgttgccgaagcggcgaaagttcttgttctctgtctactgtntgctttggtgtgaccaacatg

SEQ ID NO: 570 - DNA, 173 bp, Cyanidium caldarium
  Clone ID: LIB190-011-Q1-E1-F12
gtgtagaaaaggcgatccttgaacgtaacaaacagagttttgccaataaatcaactcacgagataccaaaagccataatttttgggcaacaaactgcaagaagagcagaaatgcacaaacaaaaggaacttcaaagccaagaagaaatcgaactggtgagaatccaatgttaa

SEQ ID NO: 571 - DNA, 420 bp, Cyanidium caldarium
  unsure at all n locations
  Clone ID: LIB190-011-Q1-E1-F2
ccgccctttttcttttgggattcgcgatgagctcccaaagcaagcgcatctcgtgttttctgtccgtccaacctttgtgttcaacactttgtcattgtggtanagttgttcctcggtcgtccagaaactcaaacgatgctccttgtggttcctcttttcatttatgtcgtggagtgaaaaggactctacaccccaaagctttgcaaccattgagtggtagaaacagattttcctccagcttctcagaaaacaattcgtcttggagaaggaacaaaaatcttctaaaggcagcagtgacggaaatagagtcccaagaacaactagatcaagaactggaaaaggcgggattcaaactaacgatcgtggacttttcgactacatggtgtggtccatgcaaagttgttgccccaaaatatgaag

SEQ ID NO: 572 - DNA, 240 bp, Cyanidium caldarium
  Clone ID: LIB190-011-Q1-E1-F3
tccacccacgcgtccgattcacctagtcaaagcaccccattgttgtactcctacgagttggaaccaacacgacgacgatcgtaccaactcatacaagacttggataaacacccgtcgtgaagctcaggtcacgccatcgaccgcataaacagaagtacttgcacacgtcgcattggatggtcatcgcaaagcagagatgaataccggaatcacgttcttagaccaaatgttgtgtcaaat

SEQ ID NO: 573 - DNA, 445 bp, Cyanidium caldarium
  unsure at all n locations
  Clone ID: LIB190-011-Q1-E1-F4
gagcaaacatggaatgacagatattattgattgatgaaaattcctccgtntttccctaagttaagggaaagaaaatccaacctccgttcccaaaagccaatccctttggagaagcaaatttgcctcttagaaaaatactcgagtctttgattcattccctgaagcataaatagtcgtatatcgttatcatcgcatcncgtaacgataatttgttcatcgttggtcatagaaaagtctaatatggtatctgaatgtccatgaaatgtttttacacaactattatttgttgctgttcttatatcccataaacaaagtgtattatctgcagaagcggataagacaagaaaaaaaaaaaaaaaaaaaaaaaaaaaaaaaaaaaaaaaaaaaaaaaaaaaaaaaaaaaaaaaaaaaaaaaaaaaaaaaaaaaaaaaaaaaaggggggccc

SEQ ID NO: 574 - DNA, 101 bp, Cyanidium caldarium
  Clone ID: LIB190-011-Q1-E1-F5
cccacgagtccgaaacaagtcgaaggagtatggaaacaggacggccgctcgagtcgttccaaggtaacgtagtcgtgcaagcgacgtcataactcttcaac

SEQ ID NO: 575 - DNA, 416 bp, Cyanidium caldarium
  Clone ID: LIB190-011-Q1-E1-F6
gtgcgttgttagaggatagtgaaattagacagcttcccaacatagaacttcatctgaagaatgatgtggagttggttttggagccagaagactacatgttaaaagttgaaagtccaaacgtcctcaccggtgaaatggaaatttatcgttgtttaggcattcattatatgcaacatttggaacgaatgggaaatgatatgattttgggaggaactcttttgcagcgttattacactgtttacgatagagagcaaatgcgcctaggatttgcaaaagccaaaagatggtctgacgtgaagtcattattggatgaaacaaggcaacccgaaatggaaaatgatactaatgtagcaactccgcagccatccccagcaacatctaacaacacgtccaacccacgtactaatgaagaacaa

SEQ ID NO: 576 - DNA, 358 bp, Cyanidium caldarium
  Clone ID: LIB190-011-Q1-E1-F7
ctgcggtgaacctttcaactagtcttcttgtaatttgctgccatgggtctttccaactccaagttattaacccgtttatttgggaaaaaagaaatgagaatccctatggtaaggcttgatgccgcgggaaaaactaccatattatacaaactcaaactgggtgaaatcctcacgaaaatttccaacaatgggttcaaactggaaaacctttaaaacaaaaatatccattttaaagggttggaactccgtggtcaaaacaagatacgaactttgttgcgccacaaatttccaaacaacccagggtacaacctcctaattgacaattaccaaaaaaaaccttttccccaaacaacggaag

SEQ ID NO: 577 - DNA, 280 bp, Cyanidium caldarium
  Clone ID: LIB190-011-Q1-E1-F8
caacagcaatgtgtaaagtatgtggctcaacaagttatcgcacccaaacaatgtgtcaagtactataccgagcagaagattcaacaaaagtattgctctcggcaagttactgaagaagaagtacaaagcaagcagtgcatcaagtatgtatctcttcagaagatcaagtacgagtcttgctctgctcaatatgaagttcaaaagaataagcagcaacaatgtactatgacagtctctgaacaatacatacagcccgatacttgctaaaagtatgttcctg

SEQ ID NO: 578 - DNA, 286 bp, Cyanidium caldarium
  Clone ID: LIB190-011-Q1-E1-G1
cacacgcgtccgcccacgcgtccgcggacgcgtgggcggacgcgtgggataaaatggccaaagtaaaccctgtgtcgtcggctcctaaactaagtgtaactagagagatagctatcggtattgggcttggtatagcgtgtgctatggtatttcgccagtggcatctcggatacacggaaatgataagaaaatattatcgcgagttggatgaacaagaacagagttcctcgtcgtcgtgaaaaccgccttgtgtttgtgagatagcaataaagtggactcttgtttc

SEQ ID NO: 579 - DNA, 398 bp, Cyanidium caldarium
  Clone ID: LIB190-011-Q1-E1-G12
gtggaatgtgttggaggagaacaaatcttttgttttgtggatgccttttgattctctcaacaacaggtttttgccattggaaggaatagaaaccaaggcagtattgatatgtgatgacgacatgtttgttcatcacgaagacattgcttatgcatttcagatttggaatcattctcgagactcgttggttggtttctttcctcgagcacataaaaaaatggaagacaatgaatatgaatacttgacacatattcctatggacggtggacacagcagatattctattatgctcactaaaatagagtttatgaagagtgaatatttattttggtattcctgtgcattcgataggagagttttacagtggattcgtgaacacaagaactgccaagacattg

SEQ ID NO: 580 - DNA, 444 bp, Cyanidium caldarium
  Clone ID: LIB190-011-Q1-E1-G2
gtccgcaccacgcatccgcttctaccagaacagcagtatgtgaaaaacagagggaaaccaagaagaagagtttgcaaggaatcaacggaagagaaacatccgacgagacacaagttgaatcatgcaaaaccacgagataaggagattttggaagaagaggaaatcttcaatttactagaagcttttagaaagtattttccagaaccaccgagcaacttgagagctcaggaaataattgaaagtaggtctggtaggttctttacggagaaagaacagtgggagctgtgggaaaacgttttgaagccttggagtcaaaaatggtactcagaaaaggaagctttcttccgtaatgctagagcgaggtttttaaacactccaagtagccaattcattactaaagaactggcagaggaatgggccaagtccttcgttcaagtaagggag

SEQ ID NO: 581 - DNA, 401 bp, Cyanidium caldarium
  Clone ID: LIB190-011-Q1-E1-G3
caacttggtcactatgattttgttgttctcttcaaagtcaaggagtttttagtaaacatattcgttcccttagctttacaattcatggacacctgttgccacagttctttgtctgcaactctcttggagggtttccccgagtcgttaccaccaaagtttttggtggagcacctcgaccagttgcttgttgtggacctgcgttgctctcaactgtacagtttgggacacattagaggttcttacagtctcccgttgaagaagaagaagcttctgaatagtgaggttgctgactcgtatgtccacaagtggttacgaaaactttccaaattcgtggatgaagaacggttgaaaaagaattgcgtatttcacgtggttctttatgatcattcttcgacagagac

SEQ ID NO: 582 - DNA, 383 bp, Cyanidium caldarium
  Clone ID: LIB190-011-Q1-E1-G4
tcgaccggacccgtccgcagacgcatgggcggacgcgtgggcggacgcgtgggtggggggaaagtatggatcctgggctaaaagcgttgcaacttcaccgccaacgaagaaagcgactggaagagaactcagttgatcaagaagcaactttgggggatagaaactacgaagacgaggataaaaagacttcaagtcaccgttacgggaccacaattgaacgaccttcgttgtatgaagaaacgggaccgtttgctttcgaaaaaaggagttatgtgaagaaaagaaagaaatacaaagatttttatgatcgtcaaacattcaaatcacaagggaacgggtccacttccagggaaaacggaaaaagcgttgtagaaagttcctac

SEQ ID NO: 583 - DNA, 77 bp, Cyanidium caldarium
  Clone ID: LIB190-011-Q1-E1-G5
cacgagtccgaacacgcgtccggacgaattccacatcgcgatcagggacacgcaatcaagtagaaccgtaccctgat

SEQ ID NO: 584 - DNA, 424 bp, Cyanidium caldarium
  Clone ID: LIB190-011-Q1-E1-G6
cttgttgattcattacgaacacaagaattgaagaattgaagcgactagtcgggttggaaatacaataatatgcagtggcaacccactgtagcctatgcagggagccgcttggaacaaccccacgtgaataggagtatggtgcaaactcctgcgactttattcggagattcgcagtatcctttgaggcgttcacagagtggtagtaagctaaaagtcatcgaagaactaagttcgcaaataaaaaacctgcaaactgagttggaaagagcttacgaagaaattgaccgcttgaagagtagttggaagggatcgaagggtcgtgagttcgtgaaaggctcaacaggagaagaaccagttgcttcttccattcggcaataccagaacgtttctgaccaagatattggcaagaggagcaaaggaaacc

SEQ ID NO: 585 - DNA, 408 bp, Cyanidium caldarium
  Clone ID: LIB190-011-Q1-E1-G8
aggacgcgtgggcggacgcgtgggcagaaacaaacggtcatattgaatgacgaaacagtggagcagttgtgtagacaagccttgtgtcatgcagcagctggtgcggatgtcgttgcaccttccgatatgatggatggtagagttggagccattcgtcggtccttggatgcgcatggatacagttatgtgagtatttgttcatatactgcaaagtatgcttcatcattttatggtcctttccgagatgcactggaatctgctccagcagatatgccatgaattacaaaagaataaaagacgtacaaatggatcctggatatgcctgggacgcttgcagagaaatggaattggatgaacataaacgtccggatatgctcatggtcaagccgggattgccttatttggata

SEQ ID NO: 586 - DNA, 240 bp, Cyanidium caldarium
  Clone ID: LIB190-011-Q1-E1-H1
acactatgtccgacaaaacaatatggagactaagaataagaaaactatcacagtgatagataaccagactggacaagagttaacgcttgaggtgaacaataacactattcgtgcagttgatttggctaaacttggagtcactgtatatgaccctgggtttttaaacactgcttcttgtatttcaagaattacttatattgatggagacaaaggcattcttcgttacagaggctatccgat

SEQ ID NO: 587 - DNA, 408 bp, Cyanidium caldarium
  Clone ID: LIB190-011-Q1-E1-H10
cccacgcgtccgcccacgcgtccgggaagctatcttgggagcactattgtgtacttgttattgtgagtggaagcgttttgaaggagaattgggggtacaagaatggaatgaattggagaagatatcttccttagatacttggaagcttgtgcttggtacaagacaaagagtggataatatgttacagcgagtacacaagctgacgagcatcttgtcctttttatactcgggcgaacaaccgagagtggactatatcgttgctgaggatgaagcaagttgggaaaagttgtggagaggaaaacgcgaggtcattggatatactttggaagcagctttacagaaaacttgtattgtggaaaaccagttgagggagtggaaaaagaaactcgatagtctagcagacaatta

SEQ ID NO: 588 - DNA, 414 bp, Cyanidium caldarium
  Clone ID: LIB190-011-Q1-E1-H12
gacattgcgcgatttgaatttccttggagatgtatggagaccaggcaacagctctcgttcatcatctgtataagagttcatcgttgcctccttacaaagaagatgcagttcgtcaagtagtgcaagaaatagaccaactctatgcccaattagtacaacttttagaaacagccaacaacgaccttagtgacccaaggataggaggaacagctatattctttcatcgagtcattcttcgtaataagcgatgtgttcttgcatacttacttcataggttttatcgtttgcgcgatagtagatatctcgtaatggatgaccgaatagaagaaaatttaagtgcttctgaacaagaattgttgacaaactatgaacaacttgtagccagctacagtgataaggtgcaaatagacattt

SEQ ID NO: 589 - DNA, 452 bp, Cyanidium caldarium
  Clone ID: LIB190-011-Q1-E1-H2
tccaccgacccgtccgaactcttcaaattgtttggaagctacatcaagtgcgcgagaggacaatttggcttttgaaaagttcacttcaagtcctatgttctccaatgtttccactcacttcacagagtcacaaagggttgttgcatcctcgcaagctgcagagagtatttcagaagactctagtgactccgagtgtgaatatgattttattctgaagaaagacagccactccaaaaacgaaacgactgaaagagaaatgggagaaccaacaacacattttataaataataatgaatcttgaaaatacacaaaagtagacactagtcagagagtgcagtatacttaagaattttcagagaccatggactctgtctcggcaagaaacatgtctttagctatgtaatcgattcttctgatggtttcctagtcttcaaacagaaaccaaagaataa

SEQ ID NO: 590 - DNA, 429 bp, Cyanidium caldarium
  Clone ID: LIB190-011-Q1-E1-H3
gatcttccttatattctttgtgcttggacaatggttgcaaagactgctctgagttgcctctttctctctttccttatcgctgccgcagttgcagccgacgtagtttcagaggagagatggggatatgctcagcaaacccaacaacagcaacagtgccaacaagtatgtaaacagtatgcatactatcagagtccagtctgcacttccgtaaccacacagagcccatactggacccaatgctcgaagactgtgcaaacctttgtcccaagccagtgcagtacttatacccaatctcctacatggacctattgcagcacctacaccaccactagcgtaacatctcaatgcagcaaggccgtgactacctatactcaaacctgctgtgcttatgcccaacaaacttcctatgcagtcagtaccgagcaatat

SEQ ID NO: 591 - DNA, 407 bp, Cyanidium caldarium
  Clone ID: LIB190-011-Q1-E1-H5
caactgagtaaatggattggtaccagtcgtcccaatgttttgactgcctatagtttcttgtcggttcttgatatttatgctatttacaaagaattgagagctgttcagttccgaactttgaattatgaacgttcaagtatgattgtggattattttgttcgaagaggatacgttcctagacctgatgaagtcagccaaagggagaatatatttcttgcacctcgttatgacgttcgttctatgtttgcttctttgtcggacgcagtttcttgtcctcaagaattgaatagtttggtcaggactttcaaaggagagcagtttatggtgactcgaacttgggacggtcagtatcgaatcgtactacgagaacatgctcgcaatagtgatattttacgagcattattgac

SEQ ID NO: 592 - DNA, 418 bp, Cyanidium caldarium
  unsure at all n locations
  Clone ID: LIB190-011-Q1-E1-H6
cggacgcgtgggtctgcggtagaacatatgaaagaagcagcaccgactgtttagcaaaaacacagcactctgcagaaaagagaaaatgtaaagtatagagtgtgcggcctgccaaatagtagagaagaaatcgatgaaagtgaaagcgagtaaaagatgaggtatagagaatggcggtcctaactgtaaggatccaaaggtancgaagtaaatagacgtttgaaaggcgtccagtatgaaaggagaaacgagtgtagcactgtctagtcgtccaactcagcgaaacagcaataactgtgaaaatgcagtaaactagcagtaggacggaaagacnccataattcttgactagataggtttagggaggagagagaatcatgaagtanaggaggtggggtaagagatgaaagaccactgca

SEQ ID NO: 593 - DNA, 304 bp, Cyanidium caldarium
  Clone ID: LIB190-011-Q1-E1-H7
cccacgcgtccgatttcagatgcttttcttgtttgtcttgccctttgtttgtttcaaacttttctttcttgtgattgtgccaacgtgtttttttgtggcgccttgctttcccgacatttcagctgccataagatctcacctgtcgggtcctctaagaaagacaaagaaactatgcaagtcaggtcaaagccctctcgtttcatggttctcaaacacttctccgaatacttttgagttggaagatgaagattctggtgaagaagaacaaggagttgtttacaaattggaaaagaactcgttaaag

SEQ ID NO: 594 - DNA, 338 bp, Cyanidium caldarium
  Clone ID: LIB190-011-Q1-E1-H9
ggaatgggatcgatgtattgtttttcacaacttgtagaagctttttgtttgatagttccattttttatacgaggaccaacttcaggacattctccttctttgatattgaaattggttactttgagtattctcgcattgtttggtataccttggtctagtacaatgactataccttgggcgttgatgggtactgctgtgtatcgagtggatcctaatcgaataggattatattccacctttttcaatctaagtcagtcaggacctcaattgttggtatctttgggttctccaagaatcgtacgaaagacgggggatgttaatgtggttttattgttggg

SEQ ID NO: 595 - DNA, 418 bp, Cyanidium caldarium
  Clone ID: LIB190-012-Q1-E1-A10
attttgcacaaaatattcgacgtcgccattgagcagccgtgatgggacgtgtaatacgaggccagagaaagggagccggtagtgtatttcgtgcgcatgtcgtcaaaagaaaaggagcagccaagtttagagcgttggattatgccgaaagacacggatatctaagaggagtcgtcagggaaatcatacacgacccaggaagaggagctcctttggctcgagtggaatttagggatccgtatagatataagagaagagtagagacttttattgcaccagaaggtttatatacgggacaattcgtgtattgtggaaagaaagcccaactagcaatcggtaacgtccttccacttggttccttacctgaaggaacagtcgtttgtaacgtcgaaggtaaaattggcgatagaggaaaaat

SEQ ID NO: 596 - DNA, 426 bp, Cyanidium caldarium
  Clone ID: LIB190-012-Q1-E1-A12
agattggttccttgggtgcagctgccattcggctgagcatgataacggacctttttattgtaaaatgagctactgattcagaacaagatgctgtcgtttgccatttttcaagtgagagttgcatttatttgccatgttttattgtttgatataggaaaatccaagttgtatcttcagtcggcgccagaatagtgacaatggtagaaccgctactaccagttccctttttagctattcaagtggctttgccataccctttagggcgtcggctcgtggtggtagcgtcgctaaagtaggagctaaggcgacgtaggctttcggcgatggacatacgaacgcccatcactcctctgaaaaccgacctgccagaataaatccttataacccagtccagtaccagcactgcgaagattcactgtcaaaccc

SEQ ID NO: 597 - DNA, 390 bp, Cyanidium caldarium
  Clone ID: LIB190-012-Q1-E1-A2
aggaaatagtacaactagtagggaaggactcgctggcagaaaacgataagattacgctggaagttgcaaaaatgatacgtgaagactttcttgcgcaaaattcgtttactgaatacgaccgattctgtccattttacaagagcgttctcatgttgcgcaatatgattcatttttatgagttggcaaataaggcagttgaaggatccggtgagcaacatctaacattggcgcagataaaggaacaaatgggtgaaaccatctacaagatatctggtatgaagtttttggatcctgcacaaggtgaagatgctttgagaagtaagctcgatgcactgtactcggagataacagacggcttttacaaaatggagaatagcctgtgacattaaa

SEQ ID NO: 598 - DNA, 389 bp, Cyanidium caldarium
  Clone ID: LIB190-012-Q1-E1-A3
gggccacgcgtccacccacgcgtccggtctagtgggtgcccctgcctgtggagatgtcatgaagttgcaaatacgagtagatgagacagggaaatagtagaaagtaggttcaagacatttggttgtggttcagctatagcttcatcttcttatgcaaccgagttgattcgaggaaaaaccttggaagaagcgagtaaaattaagaataaggaaattgcagaagagttgaagctacccccagtgaaactacattgtagtatgttggcggaagatgctattaaagcagctgtcaaagacttgcaaaagaaaatgggtgcttccagtgcctaaaagacgatggaagtttctagtctttctcttcctcctttggtgtggagaagagttgtgtg

SEQ ID NO: 599 - DNA, 387 bp, Cyanidium caldarium
  Clone ID: LIB190-012-Q1-E1-A4
agtgagaatatgcgatccttgtcgtctggttggttgtatctatggagtggttggacaagccaagttacttggagaaaaacgttttctaccgcaatacctaccaaaacgacaagtcgaggcacatttgttctttcgcagcaaggaaagcctaccaatcgtgtattagatgtgcttccagcggggtttgaacaagcaagtgttcgagagttgacggtatatcttcgagatgacttggacaggtggtcgctgaagtggtccaagcgtcccagtgattagtaagtgagagaaagagagagcattgagtatagggaaacttgaagaatatagttttccaggttctatcatcggtggtcctggtcgaatattatctttggggtgtcctggcgt

SEQ ID NO: 600 - DNA, 417 bp, Cyanidium caldarium
  Clone ID: LIB190-012-Q1-E1-A6
agaagtataaaaataggcaaagaaaacttcgagagtcccgaattctgtgggacacggaggaagcaatcagaggcattcgtgggagcgttttgaaggctcacgcttctatgaaaatatttatgtgacttgagctcattttgcttttcgagttgtcctagcgaaagcagcttccggtcacggtttttcgagaacgagttgtgagtttcataagaatattcgtttcgacggggaaatatttggttcagagctactagtaagaaaagagtcactcggaggcaattggctactaatttagttttcaagaagcttcatggaggtataaaaactttccactgtaaagaaagtcataaattacttggttgaaatttaatatcgttatctgaagctttcatgagctggcacaactgcagctttcgt

SEQ ID NO: 601 - DNA, 292 bp, Cyanidium caldarium
  Clone ID: LIB190-012-Q1-E1-B1
agcgtcgaaaccacgtaacaaacctgcgcttctcattccaggaggaaaagtgatggttcggacgatgttcactccaagtctagtagtattcgtcgcaaactttatgcggcatctcggaatcggaaacttaacaggagaaagtccgttgttcgtcagtttgtaaaggactttatgaacagtccggtattcgaagaagggtttcataagcaatcgagtcattcggaatatcgatggtttattcgatacaaacagtacatgacggctcttctaagtaaactggaaacattgcagg

SEQ ID NO: 602 - DNA, 421 bp, Cyanidium caldarium
  Clone ID: LIB190-012-Q1-E1-B12
accacgcgtccgcggacgcgtgggcgaagactctcaaaacagacaaaagtttgcggacctacttagatactattcgaccaagtcaccagatgaaatgatttcattgaaggagtacgtcagccgaatgaaagaaggtcaagactccatctattatattacgggtgaaagcaaacaagcggttgagaattcgcccttcttagaaaagcttcgacgcaaaggatatgaagttctcttcatggtggagccgattgatgagtactgcatccaacaactcaaggaatacgatggaaagaagctggtttgcgctacaaaggaaggtctgaaattggacgaaacagaggaagagaagaaagagaaggaggaacaaaagaagtctttcgaacagttgtgcactgttattaaggaaattcttggagacaaa

SEQ ID NO: 603 - DNA, 360 bp, Cyanidium caldarium
  Clone ID: LIB190-012-Q1-E1-B3
aaaagagaaaagccgtactgaagaccgacacaggtactcgaggagaaaggagacccaaattaaggtgaaagaatggacgataaggaactaggcaaaaggatatggtatcggcggtagaacatatgaaagaaccaccaccgattgtttaccaaaaacacaacactctgcaaaaaagagaaaatgtaaattatacagtgtgcggcctcccaaatattagagaagaactcgatgaaagtgaaccctagtaaaatatgaggtatacagaatggccgtcctaacggtgatgatccaagggtacccaagtaaatagacttttaaaaggcctccattattagcggacaaacgagtgtaccactgtct

SEQ ID NO: 604 - DNA, 390 bp, Cyanidium caldarium
  Clone ID: LIB190-012-Q1-E1-B6
acccacgcgtccgtgaaataataaaagagagagagcaacgacgacaaagaaaatgaggctatttcaacgttggaaaagaattggcaactatttcatctactcgcaatactctagtcgaccgagtagtttatttcaagcagaccctaggaaatataatatatatttacagcatcgagtggagaaacacctagttgcccattctatggttgcaacatccctacataatcctcgctgtcttacaagttcttcatcagaacaacattggaaccaagtacacaaaacaacaacaacaccaagtgtggataatcatcctagtggtgaagaagaaaagagtttggtactggttcctggtcaagaaacaaaagaagaacaaggagccaagcgacagag

SEQ ID NO: 605 - DNA, 68 bp, Cyanidium caldarium
  Clone ID: LIB190-012-Q1-E1-B8
aaaagaatggaaagtaaaaaaaaaaaaaaaaaatgcaaaaagaagacaagaccgaaaggtttaataaa

SEQ ID NO: 606 - DNA, 403 bp, Cyanidium caldarium
  Clone ID: LIB190-012-Q1-E1-C1
cgggccgggccacgcgtccacccaagcgtccgcgcaacaattgagttcacgtctgcgctcgatgaagtttatgaagagaaaagaacctgaagaaagtaaacctacgcaagagaatgcattttcttcaacttcgatttctacccgtgaggaaggaatagaagctgtagtagttgatgagacaaatgtaagcgttttgggtcccgaactaaacttttccagttttcaaggaagaagttccttcttgaatttcaatcctcggcttgaaagcatattgaatgagttgagaaatgttgttccacaaagtttgaatgcagatacggaagaaccatctctggaaggcaaacgacgcttccaaaataacgaaatagtagagaaattgaagaaaaagaaaagaaaagtgaag

SEQ ID NO: 607 - DNA, 422 bp, Cyanidium caldarium
  Clone ID: LIB190-012-Q1-E1-C10
ggtttcgctgcggcgataggtgcctggtggaacccatcctcgcccatcgataccatctaccgaaacattgcaccatcgcatttgctcgcatctccaatggatgaagcgtcgtcgtcgttggtaagccgcttatatgccacctggttatttctttcgaccgttgtgcgatgtacttttatgctatcttccgagttttccttgcctctagccgtcgtcaccttggccacctatgtcgtcgcgtgggtgcactttgcggtggaaatatttatttaccacacggtgccgttgaaacctggtggtcaagcacctttgttggttgcctcggtgtcgataggttggatgctgtggtatttgatggcgatgcggagtacaaggaaagcagaatataggaagaaagccaagacgaaagaaaggtccgcgca

SEQ ID NO: 608 - DNA, 423 bp, Cyanidium caldarium
  unsure at all n locations
  Clone ID: LIB190-012-Q1-E1-C11
ctctgatgcatgaagttggatttagtcgagtgcatgcagtatattcaagtatgattggtagtggaactttattgttgtttaccattcctgccatttacttgatggacagaatgggaagaagagtgctgtggttaagtttattaccaggagtgctcgttggatgtttcattataggctttagtttccgagctagcaacatccatgtcgaagaaggaatttacatttggggtatcataacatattatatgttttggggttctggtatgggaccttatgcttgggtactgggatcggaaatatatccaacttatattcgaagtgaaggaatggcgctagttacttggtggacatacattggnaactttantacgacttattgcttttccaagatgaaaagagcaatgactgctccaggaattttca

SEQ ID NO: 609 - DNA, 271 bp, Cyanidium caldarium
  Clone ID: LIB190-012-Q1-E1-C2
gggtcgggccacgcgtccagcgacccacgaagtgtccgcagctatgagtaacattggccagattgatgttattggcctttttgatcaacgtattgtgctccttgtagtctacagcgaacggtttttcatttgcagaaggaatattgtacttggctaccattagacgagcaagttcacctatagtacagagttccgggtctctgtgtcgaataacatgaataaagtctcttctatcaaagctgtttgtctttgatagattggactctatttt

SEQ ID NO: 610 - DNA, 377 bp, Cyanidium caldarium
  Clone ID: LIB190-012-Q1-E1-C3
actgtaagaaccttgccccagaatatgaaaggttaggagaagcagccaaaaatgtgaaagacgttatagttgcacaagtggatgcagacaagcactccaacttggcaaaacgttttggtgtacaaggttttccaaccataaagtggttccataagaaggtagacaaagcaagtgcagaggatttttcgggttccagaacagcggaagcgcttgcggactttattcatcaaaagctgggccgtaccaacgtcatccgtttgcctaaagcagaagctcacgtggtggagctgaatccggaaaactttgacaagattgttttggaccctggaaagaacgttttagtagagttttatgcaccctggtgtggtcattgcaaa

SEQ ID NO: 611 - DNA, 113 bp, Cyanidium caldarium
  Clone ID: LIB190-012-Q1-E1-D1
cggtcggcccacgcgtccacaaatattcttcagtaaacttctggaactatcttggaagccttgtcttgagcaaaaaaaaaaaaaaaaaaaagaaaaaaaaaacaagggcagac

SEQ ID NO: 612 - DNA, 428 bp, Cyanidium caldarium
  Clone ID: LIB190-012-Q1-E1-D10
accacgcgtccgacttgatggaaggggcgtcccaacggtttgcctttagctatacaagtctacatacaggaagaacatgcccaagcggataagcaacgtagagaactcatcgaagcaaagaacaatgcggatagtttgttgtattccacagaaaagacgttgaacgagcatcgttcaaagttgtcttcggcggaaatcacccaagtagaaacagctatcaacaatttgagaaacagtagccaaggtgagaacttggaagaaatcaagcgccatttagaagaacttcaacaagcagcgatgaagattggtgaggctatgtatcgttcttcctcgtctagtggtagtggaagcggtacgagtagcagcaacacaagcaacagcgagggaacaagcggcagcagcagcagcaatacttccagtacaatggg

SEQ ID NO: 613 - DNA, 241 bp, Cyanidium caldarium
  Clone ID: LIB190-012-Q1-E1-D12
attacttctctttcaaaatccagtcacaggacttggccttgcaagtatttggatcgtattgttgggttctcttagttattctatagtacgtcgtagagagatgatacaaaaggcagtccaagaacgtttaccagagaaagtatgaagttgcgtattttatttttaggagacactggagttggtaaaactgtaaggtgaaagaagattggtatgtcttagtaaactcatagagttactagtc

SEQ ID NO: 614 - DNA, 376 bp, Cyanidium caldarium
  Clone ID: LIB190-012-Q1-E1-D2
acatgcattgtattggcttctccttgtttacgaaagcacttgggacgttgttcgggaagacaaccttgaatagcagtgggtcgaggttgctatctacacaagcaacaggagctatagatatggaagttattccaggtaaaacgaatattggttggatcggtacaggagtgatgggtgttcatatggccaggcattgtatggacaagggatttggacccttttatgtttataataggacgatgcaaaaagcacagccgttggtagaaaagggagccacaacttgcaactcgcctaaagaacttgctcagcattgtgacgttgtatttactatggttggatatcctcacgatgtccgtcaagtaatactagacgagac

SEQ ID NO: 615 - DNA, 365 bp, Cyanidium caldarium
  Clone ID: LIB190-012-Q1-E1-D3
ggtcttcgtttatatttgaaaggcttagttgcagattcggaactaaaatcggaagcaatttgtcgtgttcatggaggaggaggagatgtgaaacggcgtagaaatcgtatccgtacgaattcctttttatctgcagtagacaagagctatgcgcatctccgttttagtccagcactttccgtttaactctgaatttatctctctttgtgaatattctattctcctgtttgtagaactgcaaagtagaattagtaataattgttggtatacgttttcccagaaatgcgactagttgtttttgtgcgtgtgtgaatagtactgggtatatatatatatatatatatatatacatatatataaatttt

SEQ ID NO: 616 - DNA, 410 bp, Cyanidium caldarium
  Clone ID: LIB190-012-Q1-E1-D4
aaggagttcctgaagacctcatcgaattgcaaccaggctttatgcaggagaactggcatcctgtttgggaagagatagatagtgctaaagtggactttttactgtcagctctaaggcgtttgaatgaagaaccagttttacacaatggagtatggaccaaaaccaaacgaaaagtcatcgttttttcacagtttttggaacatatttttttgatttcgaatattctggacagacatggttatcgatattgtcgtgtgttgggagcattgtcttatcaagcaaagatgaatgcactccatcgttttcgaaacgatagttgcgttcagattttaattctcgactctacaggttctctagggcatgatttgagttttgtttcacacatatttataatgggaaccggtttggga

SEQ ID NO: 617 - DNA, 382 bp, Cyanidium caldarium
  Clone ID: LIB190-012-Q1-E1-D5
aagcgtcgacgtcgcatttgtagtagtattgtggtgctctttccaaccggtttctccaacgacgcaacacaaaaatgcctcgtggtccaagaaaacatatgaaacgtttggcagcacccaaacattggatgctcagcaaacttggtggtatttgggcacctagacctagcagtggaccgcacaagttgcgagagtcactacctctcttattggttctccgcaatcgactgaaatatgcgctcaataatagagaagcagtggctattttgatgcagcgtttggtaaaagtggatggaaaagtacgcaccgataaaacttttccagcaggtttcatggatgtgattgaattggaacgaaccaatgaaacttttcgtttattgta

SEQ ID NO: 618 - DNA, 371 bp, Cyanidium caldarium
  Clone ID: LIB190-012-Q1-E1-D7
accagctttggctgttcatggagacaagtcacagcaagaacgtgactgggttttgtctcagtttcgctctggtaagcaaccgttgatggttgctaccgacgtagctgcgagaggtttggatatcaaggatgtcaaatatgttatcaactacgatttcccgaatactatagaagactatgttcatcgcattggtcgcactggtcgtgctggtgcccttggaaagtcccatacgtttttcactccggataaattccgtgttgcgaaagaattagttaacttgttgcgagatgctggacaggacattcctcccgagttggctcgtttgataaaaacttcgtcctttggcggtaacaacagaaacttttctcgtt

SEQ ID NO: 619 - DNA, 214 bp, Cyanidium caldarium
  Clone ID: LIB190-012-Q1-E1-D8
acggagatgcatcaagaagagtctgcataaaggactagttttgtatagttgccatcatggacggtttgtgtggaaagttgtgattgtgtagagagtgtgtttgtgagttgtgtgtggtattgttgttttacgtctttgtgagtgaccactcgtaggagtgtgatgaatcctcacaaagatgatagaagacaataaaacgatgttgttttggtat

SEQ ID NO: 620 - DNA, 378 bp, Cyanidium caldarium
  Clone ID: LIB190-012-Q1-E1-E1
acccaagcgtccgcatccatacagacaaggcattgtctataaatagacatatagcatattattatctatatccacgatatttccaccaccaagggtgaccatgttttctgtggcttcctttctcctagaacaaaacaagaacaacaacaatcctagtgaaccatcgtcttcgttggtacctactgccaagtttctggaagacatcgacaaagtcatagaagaacaaggtggaacgagcgctgttttccaagctttagaacaactatacacgcgttacaagatcctagattctagtctgactcgacaaaagaagagttttcaagaaaaaatacccgacttgactaatgctttgcaagtgattcgttggttacaacaacg

SEQ ID NO: 621 - DNA, 203 bp, Cyanidium caldarium
  Clone ID: LIB190-012-Q1-E1-E12
accacgcgtccgcccacgcgtccgcccacgcgtccgcccacgcgtccgcccacgcgtccgcccacgcgtccgcccacgcgtccgcccacgcgtccgggtgtatgatgcaggcaaagaagtgacgcagtagatcagagagtaacacatgcaagtaggtaaagcgaacgggtgagtaaagaggtgtgaaagagtggaagaacatg

SEQ ID NO: 622 - DNA, 375 bp, Cyanidium caldarium
  Clone ID: LIB190-012-Q1-E1-E3
acaaatcaacccgatccttcttatacaagttaactgccatccttgcaaaaagtcgtaaatgttcattttgtacctaatagtagaactatctgaaaaagagaagcggattacagatgcgccttttgggacgtgacgtagaacgcctgctgctactggtacgattaacgctcttgctttccggtgccacttagctctaggttccttctcagttgtaaatggtgtgcgttactaagatagatatactctctattcgtccctgaactatcttctcactcatgatgttcttgtcaggacagcttttagggttgcttgttaaggatgcaagtactcgatgagaaaatttgcaaatgtttttaaagaatgaaatttgttgat

SEQ ID NO: 623 - DNA, 177 bp, Cyanidium caldarium
  Clone ID: LIB190-012-Q1-E1-E4
acccaagcgtccgaggctttattcgtttagtagttgacaaatggggagctattaagccgcctggaccaacggaaaagttacaaggaccaccaaaagtagaaaacaatatttccaacatagaatatgaactcgtgtaagacacttatcgtaaaagaagcaaccattgtttttatatcg

SEQ ID NO: 624 - DNA, 423 bp, Cyanidium caldarium
  Clone ID: LIB190-012-Q1-E1-E6
acggacgcgtgggtccacataatgatatgaccaccttagaaaagttgctggcagaaacagtttcgaatgatcccatttcgggtaaagtgacacaaaggagatttatcatcgtggaaggaatatcaagcaagtttgcggatgtgacacctttggataaagttgtggaattgaagaatcagtatcgttttcgattgattgtggacgaaagttattcgttgggtgttctaggcaaaacaggtcgtggagctttagaacattttggattggaaaccacagatgcagatattgttttggcagatttgggaaatgctattgcaactgtgggtggattctgctgtagtagtgaagaagtagccaatcatcaacggttatcgagtgctggttattgtttttccgcctcaaaagcttccttttttggcaaag

SEQ ID NO: 625 - DNA, 389 bp, Cyanidium caldarium
  Clone ID: LIB190-012-Q1-E1-E7
aagtaagtgcgcttggcaacaaactaaaagatggcaagaagaatcatcggagcttatatgtctgacgctactgtagcgtctctatttagtgtgaaaatgttgttctaccttacaatacttgcgttctctatcactattgtgggtcttatgggtaagagttccgacggtatttgggttcacagtgttccagcgaaagacgaatattgtgcatacaagtcttcccttcaagtaaaccaccacggcatagcttcctattgcaagtatatcatggctgtagcagctattggtttggttatcagcttcttcgagttttggtatgcattcctcggaattttcttcaagtggcaacaaaagttgtggtatattgaatctgctatcaacgtgttttt

SEQ ID NO: 626 - DNA, 384 bp, Cyanidium caldarium
  Clone ID: LIB190-012-Q1-E1-F1
acccaagcgtccgcccacgcgtccgcccacgcgtccgcaacttaaggagatagaaacaacaacaggaaagcacaaaatggagtagggaatctattgcttcattatagactagaccagaataattatataggttatggccgagaggagtgcaaactggaatctctttattgagacgaacaaccatcgactagctgttttgagaaaagaggcctctcatgaataggttgatccaacacacaacaaggattttaatactaaccgacgtgttgcataaataagatgtcttctacgacgcgtcattttgtaatatcactgtaaaatttcatctcctagtgctccttggtgttatttgatatttaaataagtagattccttaaagaattt

SEQ ID NO: 627 - DNA, 282 bp, Cyanidium caldarium
  Clone ID: LIB190-012-Q1-E1-F10
acaagaaactccatcaaagtccatatcacgtgttcttctatagagtgttgttgctgttgttgctgtctattggtagagtcttccgcatttttatctttctttgtagcagcgctgaaaacacactcgttttcatcaatcgtctgctccaataggctatccttgttggtcaaatctctgatatataaagcatccgcaaatggatcatccaactgaaaaaaaaaaaaaaaaaaaaaaaaaaaaaaaaaaaaaaaaaaaaaaaaaaaggaaaaaaaaaaaaaataa

SEQ ID NO: 628 - DNA, 398 bp, Cyanidium caldarium
  Clone ID: LIB190-012-Q1-E1-F12
aggacgcgtgggcgtcacgagagaaagagcgagagaggttatgggagacggagggataggtaagtaaatacgaggcgacctggtttttttttccatcccacgttggtagcttttgtatgtacactcgttggttgtattgcattgttgtggtttctattacaactggctattgccaatccgcaatatcgtagttggaaaaaagagtggatagctatcgttgttgcgtcgataggtttgggagaaggattgctatttatgttgatatacagtggacaaagtttatgaactagggttggttttccctggtagttgaggacaggtgaaatattttcctggttgcttgtctcactcgtcgagccccttgttgtaataaattgccgctagcctccatttctttc

SEQ ID NO: 629 - DNA, 404 bp, Cyanidium caldarium
  Clone ID: LIB190-012-Q1-E1-F2
aagacaatgaggctctttataacatttgtcacaatactttgaaattgagtaatccctcttatagcgacctcaatcagttggtaactgcagtaatgtcgggaatcacttgttctcttcgttttccaggacaactcaatgcagatttgcgtaaattagctaccaatctgattccattccctcgtctacactttttcatgattggattcgctcctttagctgctcccggaacgcagcagtacaagtcaagtagtattgctgacttgtgtcaacaaatctttgattctcgtaacatgatggcagcatgtgatcctcgtcatgggcgttaccttactgcagcagcttatttccgaggaaaggtgccaaccaacgaaattgatgaccaactaatgaacgttcaaaacaag

SEQ ID NO: 630 - DNA, 363 bp, Cyanidium caldarium
  Clone ID: LIB190-012-Q1-E1-F3
agtgcagcaagctcggggaaaacctctactggtgtatctcggacggtaactagaggagtgaacctaagtggagcagatttttcgggacaggaccttagtggtgtcagttttcaacagagtctattaagagaaaccgactttcatgggtcgaaattggtttcagcctccttctttggagcagagttatcctatgctaatttggaagatgcggatctttcagaagctaatttagagttggcaaatcttcgtaacgccaagcttaagaatgctattttacgaggagcatacttttcaggaaatacgcgtttagagaatgctgatatcgaaggtgctgatttttcccaagttattcttagaaaggac

SEQ ID NO: 631 - DNA, 372 bp, Cyanidium caldarium
  Clone ID: LIB190-012-Q1-E1-F4
aagtttcaaaatgctgcgagtagagtttccaacaactattcgttcagatagagttgcatatgaaacacagtttggatatgtcacgagacctaatcatcgaaacactacttgggaagctgccaagtttgaagtttgtggacatcgcttttgcgatatttcagaacctggttttggcttggctttgttgaatgatagtaaatacggatattctgcaaagggaagcactttgaggcttacgttattaaggtcaccaaagagcccagataaggagtgcgacattggcgaccatgcattttcttacgcagtgttgccccacgttcctgattttccatgtgaacaagtttttacggctgctcataaactgaacagaga

SEQ ID NO: 632 - DNA, 383 bp, Cyanidium caldarium
  Clone ID: LIB190-012-Q1-E1-F5
acccacgcgtccgcgcaaatttggaggtctttgtgaatctcaggcaacactgacgtattcttagcctctttttgtttttcctagtcgtttctttgtcaaggtgtagaactttgttgaacatacatatgccctattgtaattttatatcgccttttgttgccaaggaaacattcagagctcagcacgcacctggttcctctcatttcgtttcaaattgttgctcctatagactgagaagcaatcgatttgcttcatttagtgacagcagagttagaagactaggattgagtgtttacatgggaaaggtttccgactttggtcctttcactcctattgtatacgtgacgcgatgggtcttgggcagggataggtttaacaggata

SEQ ID NO: 633 - DNA, 331 bp, Cyanidium caldarium
  Clone ID: LIB190-012-Q1-E1-G10
gaacaatacatacagcccgatacttgctacaagtatgtccctgaacaacaattggtgcctcatacttgttacaagtattattctgtacccaagtttattgaaaagtgctatcctcagtatgcaacaacggagaaatgtgtagagtatgagtatgttccatatgccacttctacaccttatccatcggtatctccaagttatactccttcagcatatcaaacaacttctgcttattaaagagccgaagactggatagatttttgaagtgtctcgtgttcaaagaaaacatgagacatgaagaaaacagtaaaggatttggtttttatccgtt

SEQ ID NO: 634 - DNA, 422 bp, Cyanidium caldarium
  Clone ID: LIB190-012-Q1-E1-G12
agggcgtcgtcgactaggcggtgtgaagaataaatatgggaagaagaccggcaaggtgttatcgttatatcaagaacaaaccataccccaagtctcgtttctgtcgtggtgtcccagaccccaaaatacgaatttatgacttgggtaaaaagaaggcaggggttgaagagtttcccctttgtgtgcatttgatttccgacgaaaaccagcaaatatcttcagaagcgctggaagctgctcgggttgcttgcaacaagtacatgacaaagcatgcagggaaggatacttttcacataagagttcgcgcccatcctttccacgtcattcgaattaataaaatgttgtcgtgtgctggagcagataggttacaaactggtatgcgtggtgcgtttgggaagccgcaaggaacggtagctcgtgtt

SEQ ID NO: 635 - DNA, 378 bp, Cyanidium caldarium
  unsure at all n locations
  Clone ID: LIB190-012-Q1-E1-G2
aaaagaaatggaaaaggaaccaaagcctgctgtgggtcccagaaagggctctgctgcaccagtagatggtatgaaaactcgtatgatacgtcgtcaagtggacagaaataaacggtataacaagtcacatagtgtaacgcaagacatagctgttcctttgtcatatgcacaagtcgcaaagcaaaaagcgtttggaaaaagagctagtttgctccatacggaaactagcactaacatttatagagaaaccaaaaagggtattgtagtttcgcgtancgttggatacccaaacaacagcgagaaacctcgcctccgaaagtttcgactagttcccaaccccaacccgttggatagccgtgctcctcaactcatccgacg

SEQ ID NO: 636 - DNA, 400 bp, Cyanidium caldarium
  Clone ID: LIB190-012-Q1-E1-G3
aggtagtatgaaagaaaaggccaaattgttggatgccaagtttctaaggaagtattatgaggagaacaaggacttcttcttcttgtcgactagagaagagaagaaaatgtttgtgacgttacaacttgccagggaatatgcagagctggtagatgaccaattcttgaagggcttcttcgagaaggctctggagtctgctcagaagacgttttaatttgtcaagtagagtgtagtgtgcgtttttctgtgtgtatttgtctctgtgtgtgtgtgtctgtgtgtgtagtgagtggagccgagtcagagaaaacggcttggttctttcctgtggacatagtgggtaaagtctgatgggtttctccacggctttttagtaaataaaagtttgtgtccgtttggg

SEQ ID NO: 637 - DNA, 370 bp, Cyanidium caldarium
  Clone ID: LIB190-012-Q1-E1-G5
aaaaatttttgcaagcttcaacaagcctacacatatatctcctcgtttcttaagaccctttattttcattactctttttgtattatttctgtatcatagtcctttcatggaaagtttgttgaggggaatcctttaaggagaaatttgaagtttgagtgacttggttatggaaccaatctctaaggacgacgggtatcgaagtttctcaggaagcgacaactgcgagagctacttgcagtgcgataatagcttactattcggagacttgcagctttcacccatcacttcttccgtcaaaccctctccagcaaaatctactactgttgatagcagctacagctctgaacctttccttcccttggctttgcac

SEQ ID NO: 638 - DNA, 179 bp, Cyanidium caldarium
  Clone ID: LIB190-012-Q1-E1-G7
tgcgacatcgaacaatctacacttttacaacgtagaccgctgtccaacgagtggatgtaagccatgctgcttcttgaccatcaaaataaagaacgacatggtcgtcatcatacatcttgccattgaagtcgttcacttcataaactaccaattcctgaagggcttcttcgacaaggctc

SEQ ID NO: 639 - DNA, 270 bp, Cyanidium caldarium
  Clone ID: LIB190-012-Q1-E1-H10
cggacgcgtgggcggacgcgtggggcgtgacttgacgacgttgggaaccacatggttcatctatttctcagcaataggcattcttcgaaaactcattaggaaacctcaccctttacaacctattgtgtttttccacaacctttttctggcagttgctagtttatggatgttcctaggtatctgtgtggctctaaagaacacttggatggaaggcggcttgaaagctatctattgtccccactctataaaaacttccaacccattgacctc

SEQ ID NO: 640 - DNA, 414 bp, Cyanidium caldarium
  Clone ID: LIB190-012-Q1-E1-H12
accacgcgtccgcacggacagttgaaaaagattgcatccaaggcgctcgaggactattcgaaacaagtcatggaagaacaacttcaaatttggtcgcgcaaaatatttggagtcgtgtaaattctatttatttccaccaaaaactcaagaagatactcttatccaacgacttgagtgccagctatcagatggaatatgcaacatatcaccaccccttccaagaatacaatcttgataaacggcgtgaatataatttggatacttttctatatccacttgttcgataagttcaatcagacttgcatttctttgtatagtaccttgagatggacagcgtttactgctctcttctgggggaaaatatttccatccaactatctgaacaaagagattgtgttgtgggtcatcataaag

SEQ ID NO: 641 - DNA, 421 bp, Cyanidium caldarium
  Clone ID: LIB190-012-Q1-E1-H6
aaatattccttactatgtggtggttggttggtgcaattgtggtgactgcaaagcgaccttctagtgttgttatggatgcgcttcacataacgaaagatatcaattcaatcgaaggcctttcatggatcaactttgcttttacgctattcctttgtggagtagcagcagttgacggattgttggtgggagataagaccagcagctccggcaaacagaatacaggagcgaacaatgcttgagtttcttgagaagttacaaatagtcgtgtctatgaagttgtctgagttgcgtgagaaaagacaagtagttgtgtctatgaagttgtcgtaaatagttgatgtgtgttgtgttgttttgccacagaaaggatgtttcgtccttggtggcctttgcaattgccattaaatgacacaatttgtgt

SEQ ID NO: 642 - DNA, 368 bp, Cyanidium caldarium
  Clone ID: LIB190-012-Q1-E1-H8
atagactcctgccgatttgtcgatcatgtagtatctggtttaaatgagaaaggtgaatgtttgccatctgcttgttatcacggagaaatgcctccaaaagaaaggcgtgcaagttggataagattctgtgagaaggatgctggatttctggtttgtacagatttaggtgcgcgcggcttagatattccatctattggtggtattatcatgttcgactttccgaagactacaaccagttacttacaccgcgttggaagaatccgtaatgaaggtgttgtatatactccaataacgcattcctcagggaaaattgctgagatatgtctttctgcacatgttgcaactatagcaaccaaaaaagttgatac

SEQ ID NO: 643 - DNA, 440 bp, Cyanidium caldarium
  Clone ID: LIB190-013-Q1-E1-A10
aatgatcgatggaagaaaagagtgaagacttgttggataaggaacttgagtccttgttgaaagaacgagatgctattttgaatggaacaagtgaagaatacttgagtcaattggcgcctttagagaatgaaaggaaacgtaaactcgatagagctatggacttttatcaacttcaactacaatatgcagaacagctgtatgagttggccaagaaagaagcatatgatagctttcaagcacaaaaggcagaacaaagagaatatatgtggcgtattaagttggaaagagaaattaccttgagactcttaagattatccattccactaagggatccaaacggacaagtgattgtaggaacctttggaatggaaggctttgtgaatcttatctatcgcaatcgtttattcgaaaattgttctaaaagaagaaaataccttttc

SEQ ID NO: 644 - DNA, 433 bp, Cyanidium caldarium
  Clone ID: LIB190-013-Q1-E1-A4
cacgcgtccgcaatgaatgccctgagtgccagtcagtccttgtcgtcttccttggctccacagttgaacgcagacgttcctgatacttgtaaagagtgtggaagtgacgacttggttgaagaccatgcccaaggagacgtcatatgtagaaactgtggtttggtagctgcggaaagaattgtagacttgggttcggagtggagaaactttgaaaacgatgacagcggtacagaccctagtcgtgttggagggccgagcaaccccctccttgagtcgggtccaagtaccgtgattggaggagtagtatcggactctaaaagtttgaacgcacgtttaaatagggctcagaatagacacagtacttcaaaaagtgaccgagttttgttggatgcgttttctttaataagtcagttcgcggaacgctcttccctgt

SEQ ID NO: 645 - DNA, 355 bp, Cyanidium caldarium
  Clone ID: LIB190-013-Q1-E1-A5
ataacagggagtacatgaggactgagagctcatggccgtcatagtatgagaatgagtgccgtgagtgaacccatgatgctgcttgaagaagacagtgtccagcgcgtaccctttgcatcatgtcccagctagtgctcgaggatgcacaaagaggggcactcattgtagcaccgcaagacccgaagctagttgatcatatgccgtccaagcgaagtaaggctgaaccagtatcagtggaacatgcattgctatcgatcgcatacggagtgaacggccagtcaaagctagtgatagctggtactcctcgagcgctatctacgtagcgtatgcaggcatgaagatggtaaatgaacac

SEQ ID NO: 646 - DNA, 217 bp, Cyanidium caldarium
  Clone ID: LIB190-013-Q1-E1-A6
cccaaacgtccgaacaaaatggagaaagtggtattctatattgacgaaccccgccactgcagctgtttgttcgtctccttccaaaatgaggcaatgcataataagaaaatcccacaaggaacaaatgcaaatgattcagtgcacatctgcaataaatgcaatgatcgacaaaatggcgccattgttttggcgcgtccggtcattttttttcttctcc

SEQ ID NO: 647 - DNA, 367 bp, Cyanidium caldarium
  Clone ID: LIB190-013-Q1-E1-A9
agcccacgcgtccgcccacgcgtccgcttccgtggcacgcatgttcagttggttgtagatggaagcgtccatgaataataaaccaagcaccaagccaaagtctccttgtttctcttctgggccttgtgccaaacaccctggatactctttagaaaagtctctttctaatgcagcactgggtcgttctcatcgctcgactattggaaaatccaagctgaagaacgcaatcgaaaagactaagcagattctgcaacttccttcgtcttatcgtgttgctatcgttccaggttctgataccggtgccgtagaaatggcgctttggagcttgttagggccacgtcctgtagatgtttgttattgggagtct

SEQ ID NO: 648 - DNA, 292 bp, Cyanidium caldarium
  Clone ID: LIB190-013-Q1-E1-B1
acgcgtccggatttgtaggattgacttgaaaaagatgaagaatgggaaaggttcacggttctcttgctcgtgctgatatattactaggtcaaacataaaaggttccgatacaggaaaagaagaatcgtccaaaggggaaggcttggcaaacactcaagtacaatatgcgtattgtgagtgttgttgttggttttggtaagagaagaggtcccaacgccaactcgtgaaacgactgcaatgatacagacattactttacacctttaacaggtaacagtcgcacctcaagaaaa

SEQ ID NO: 649 - DNA, 407 bp, Cyanidium caldarium
  Clone ID: LIB190-013-Q1-E1-B2
cggaacaagtcccgactcctgttcgaggtattctcaataatggcggcctttatggagaaagaaaaggatggtatttgcctgattatccagattttgactgggaggttgtgtcacttccttacgacttgaacgaagcagcagtagcttggtttcgaacaagttttgaacttgacattcctctggatgttgacgttcccatcggtttgcttatacaggatgatccttcttacagatataatgctctcatactcgtcaatggttggatgctggggcactacatcaattacttaggaccacagcatgactttgtacttcagaatggaattctgaatcgcactggaaagaatgatatagccctagcagtttggggacaagaccttgctggaggaagacttggaaacgtttcc

SEQ ID NO: 650 - DNA, 453 bp, Cyanidium caldarium
  Clone ID: LIB190-013-Q1-E1-B3
cacgcgtccgcccacacgtccgggaatttgttggtggtggaaggcgtaactttgtgggtttccttacaagatgtcttttatatttcgtggaatcaaaggcctttccaatcctcgttatggacaacccgtggatttacccaccggaataatgtatagcttgaagcagatgtcgtacattgtccagtttgctttttctgttgtagtcattgctatgttctcccaagttaccttttatctataccgtgactttaagtgtgctttcgatgggcattgggattacgccacgcatagcgaagtgtctggtcctgtgggttattgccgttacttcattgctttggggagcatttccatcgtacttttagctattgttgccgtagctacttttggaacgctgtattttgaagttcctatggactatatcttttatggtgaatgggggattaacgcttttct

SEQ ID NO: 651 - DNA, 347 bp, Cyanidium caldarium
  Clone ID: LIB190-013-Q1-E1-B4
cacgcgtccgcgcagagcgtctaagatgttgtgtgtagtagacagcgtacctttgcgggatactgtaaagcagtgccattatatggctccgaatggattgcccttccagtcatcgatttgcccaacccgttgattgacgtacaggagcactctatacgttgacgcggagatcggacactctccattatgcgatatctggtcgattcagagctatgtacaccgaaatggtctcttcactatatcatgacatacaatgatcatccgatgtggtactcagattcgtccaggcataatcggttgtccgtgtgtatcaagtcattgccattagatcagggtgttcgggacca

SEQ ID NO: 652 - DNA, 472 bp, Cyanidium caldarium
  unsure at all n locations
  Clone ID: LIB190-013-Q1-E1-B6
cggacacgtgggcggacgcgtgggtagtttttcacgttccacttatctcaacaggttagtcatgagcaaagaagatggcatggaggcctcaagacgagctcccgaagacgtcattcgaacgcttccacctagacttcctgaacccgaacgtcgggaattgtgggaacagataaatttacttaggcaagaaaaagatttggcagcaaaggagtacaggtttgaggaagccgcaaagttaaaggaacgagccttagagttgatgctgcaagacccttatgcatgtttggaactcgaacttcagaaagctatcgaggaagaaagatataaggatgcagctatcttctccgatgcgatgagggaaattggtgaacccccaaaaagtgagaaaaaggacacagaacaaaaaagtgccccaaaaagtagaaatgtgtntggctttgttccgaaagactggccgaccaagtcaaacact

SEQ ID NO: 653 - DNA, 478 bp, Cyanidium caldarium
  Clone ID: LIB190-013-Q1-E1-B7
tcggccacgcgtccgattgaaatatacaccatttccatggtgtctttgagcttttttgttgctgccatctatgtctgttatggcaaaaagtccgtatggagtgtttgtataccagtttttgctttgatatttggagcgtttgatgcctttgtccttgtaagcataccagcacttttagttgcagcaatctatgttagtattccaaccagtatttcaggctggacttccataacttttgggttcgtatttggtgcaattattttattattagagaccgggatgttgaaatttttggattaagaaacgacctagccgtatagtataaggttacacacctatacttatccattcactgtttctagaaatactcttcctgtcccggaacgagcgatttgcttggcttgcctttgccgttcctgacgaaatagtttcttccagtcactcttttcagcccgtcggaaagctttccattctttta

SEQ ID NO: 654 - DNA, 471 bp, Cyanidium caldarium
  Clone ID: LIB190-013-Q1-E1-B8
gattattgtggggaaagaattcaccacgttgaggatttctccagcggctgcttgtgctcctttcatggaatttgcgcaagatatttctttcgagattggtgaacgtgatacttgggtcattataaagtgccgggatagaagtggactgcttttagatattattcataccctggtccacttcaacttgagtattcattcggctgtcatagaaactttgcgggatggaagtgtccaagatagatttggtgttcgtagaaaagaggatggctcgaaaataatcaatagagaggaattggaacctttaaaggctgccttagaacaaattgtcggagaaaagcccattcgagtgttttggaaacaaactgtggatatatttcaagttcttcacatagtttgtccagaaaggtctcatcttcttggcgacttggtttctcttttagaatacgaacagctgttggtcaaggcctgtga

SEQ ID NO: 655 - DNA, 461 bp, Cyanidium caldarium
  Clone ID: LIB190-013-Q1-E1-B9
gggccgacgcccgcgtccagcactattagaaactcgagtaatggatgcattgactcaagtttctaagaattccgactactcgagacttgcaagtctccgtgtctatcgccaaaaacttttggatttgaaggctattgctgaccagatggatgccttgctggaagaattttttgattccgattttgtcgaaaaagctttgtttagagaggacaatgggagcaaggatattggtccttgtggtagtttggatgacctgaaatatattttcgaaccttatcttcagagtttggatttacaaaagagtatttgtggtagttttttgaaggcactacaaaatgtggaacgtggcttgatgcttggatttgactttattcgcaacaaacttttcactttggatttgttgggaactattttgattctcaattttactcctaacaatatgggtggaaggttttttgggt

SEQ ID NO: 656 - DNA, 293 bp, Cyanidium caldarium
  Clone ID: LIB190-013-Q1-E1-C1
tccactagagaagatgatgatcgatcatcattgtgtccgtaactcacaaagataggtgaatacgtcaccatagtgtcacaggatggcaatatttcaggcatcaactttcagattgccactcgaacgaaacagcgcatcatttatcatttgcaacgaaagaaaggttctgggatagatccgaattttgccggtcaatgggatcaggacatcccttttcaaaatacagtttttttggaaaaggccccctttggagtacggttgtggtccaagggtcccattcctttccaaattgc

SEQ ID NO: 657 - DNA, 393 bp, Cyanidium caldarium
  unsure at all n locations
  Clone ID: LIB190-013-Q1-E1-C10
tttgatgcaaaaaggaatggggtaatttgaaaaaggaatgaagaacccaaagagaccttaattaaccaacctgggaagaaccaaagttaccggataaattacaactcaaccaaaatttaataacaaaagttggttaaaatgataaccggaggtggcatgtgttaaacttttcttcgagtattatattccatgcccattggagacccaattatgatgagcctggatcacatttggtagaaaatattatganagaagccaaagaaagaaatgtanagatacattttccagtagattttgtagtagccgatcgtatggctcccgatgcacatacagagatacgtactagagaacaaggtattcctgagcatatgcaaggactggattgtggaccac

SEQ ID NO: 658 - DNA, 310 bp, Cyanidium caldarium
  Clone ID: LIB190-013-Q1-E1-C2
gcggacacgtgggaggaatgctagattttcatcaacagcatggtagaatgggcacagtcttatacacacaggtggaagattgatgcaaatatggcgtcgaacattttgtgatgacccagaagagtgagggttatgtagatatacccccattgattgttgggaacagtacacattctggagcacatgtgaaaagtctaaataatttgtatatccaggatttgacatcgacacctatcgatacggaagtttttcgggaacggcgtgcagaaggacagtagtcttcagtccaccttgaatcgttttgggcggt

SEQ ID NO: 659 - DNA, 255 bp, Cyanidium caldarium
  Clone ID: LIB190-013-Q1-E1-C3
gccacgcgtccggtgcaaatcgtcactgggtacatcgtcccatggaggattgcattctagttggataaagcgaatcatgatcaaatggaagccttggttgatggacacaagttcgatttcacctaacgcgaaattatttattgcccgtacgttttggggatagagatggagacaacgtacgatacgtagcagacgctacataattgattgtgagtacattgcaaaagaatctcgagttgggtatacgcggtccta

SEQ ID NO: 660 - DNA, 476 bp, Cyanidium caldarium
  Clone ID: LIB190-013-Q1-E1-C4
tccgaaacaaactgtcactgagtacaacgtgctttggtggagtgaattctacaaacacaatgctattgatgaactagtgcgaaacaacaatgccatacccaaattcgttttcgcctagctcgaaattttttactgcaaataaactttggagacagagaaggaaacagagtacgatgcccaacaacctccacttagttgattgtggagacacagcagaggaagtttgaaaatggaatattctgttcgaaagtactggacttgacttccaacggaaagatggaaaaggatgcaactctaccatgactgcgatgaagcaaaagtattcgttgtacagttggatagatggacggcagtcttttcggtctccggtcagactgcgaaatgctttcttcaaatgtctcacttgtgacacttgcagtgttacgacgtgccaatcgcttttaccttttcccttgaaaaattctctctggaaagtc

SEQ ID NO: 661 - DNA, 456 bp, Cyanidium caldarium
  Clone ID: LIB190-013-Q1-E1-D10
gggccgacgcacgcgtcaatggagaaggacgagcatcaggcagtggcaagggaattggctattcgcaaacgactcggcaaagtatttaaaaaaaagagagaagactttgctactgaagaagaatataataattatttagaagcttttgaagatgctgtatatagtttgagtgaaggaaccaacacagatgaagcccaagcaagtatggagagacttgcaaagtatatcaaagacactagtagagaagaaatactcatgaatccagttttgattgtgggtgatgagagcgaggacaagaataatgagagtagcgaacaacaaggagtgacctttgtcgatcctacaagaccagcaaagcctatgcctgctcctttacgagacaacagtcctgtggatgagaagatgcgtgcaagagcttccggattcgacgaaaaactatgtcgtcaacgagcactg

SEQ ID NO: 662 - DNA, 263 bp, Cyanidium caldarium
  Clone ID: LIB190-013-Q1-E1-D11
acccacgcgctccagaaatattatcctgtgccaaaataaaataaaaaaaaaaaagaaaaaaaaaaaaaaaaaaaaaaaaaaagaaggaaaaacaaaaaagaaaaaaaaataggtcagccacccaaaagggtcaaaactcatctaaaatatcaacagggggtcatttcactgcgatatcgtcttcaacattcatttcagggaccttcctgtgcttaccccgtgtctgcgaattcccggacaattccccttctttaccaccttgt

SEQ ID NO: 663 - DNA, 452 bp, Cyanidium caldarium
  Clone ID: LIB190-013-Q1-E1-D4
cacgcgtccgcccaaagttgcacttcgacggtacgccggtcaaacattggaatcggataaattcagcgaaaatgaaatacccttaggtaaaggattcagaacctaaaaaatatttggagctagacgattcgttgcagcagccagtgggttcatcttgtagcaccaagtggctgtttattgcaaccccactgttggaagttgcatgtactgatgggcagcgaattgaaatgattcctttgaagaaagatataaaggaattgtttttctctactttaaggaagaactttgagtcgaacgaagcgtcatgggagtgcattgtagttgaaaccgcagttgctgtttttagccagtattatgaacagtgtgtggaacagtactatctagcacgcatggattatgagctacctggttagtccaaagtaaaacagattcggagtatgattgaacatgtt

SEQ ID NO: 664 - DNA, 410 bp, Cyanidium caldarium
  Clone ID: LIB190-013-Q1-E1-E1
tgtcatccttgtgagtagtgataatgaagtttttgaagtatacacaagcgttgtatccccttctgaaacactattgtccgtctcggtagacactgtagacatataaagcattcccttgcctaacgtggaaggacgacttcttgcaaaggttatcgagtattgtagatatcactcactcttaaagaccattccgcagtctgatgaggatattgagcgctgggatagggaattcctaaatgtcgatcaaccaaccctttttcaattgactctggctgcatattatttggatatcaagagcttgttggatttaccttgtaagcgagtatcagatatgattcaaggcaagatgccggacgatataagataagagtttaatagttgtaatgattttactcccgaagaagaataat

SEQ ID NO: 665 - DNA, 477 bp, Cyanidium caldarium
  Clone ID: LIB190-013-Q1-E1-E11
ggtctagaattaccgggctcgagcacgcgtcaacactttttcataaactatttgtgaagctacaatgccatcacgaggagacataaacctaagagatactccaaaagttcatgaaaaaatagcacataaacaggaaacaggaaaagtattcttctcttttgaatatttccctcccaaaacaccatcaggagtggataacctttatgacagaattgaccgcatggccagagtagaaccactttttgttgacgtcacgtggggtgctggcggctctacgtcagatgtgacacttgaaattagcggaaacattcagcgctattttggtttggatgtatgcatgcacctaacgtgtacaaacatgccagcaggtaaagtggatgaagcattgaatgctgccaaagaaagaggcataagaaatattgttgctttaagaagggatcctccaaaaggagaagaaatggttagagtaaaaaccat

SEQ ID NO: 666 - DNA, 54 bp, Cyanidium caldarium
  Clone ID: LIB190-013-Q1-E1-E2
ttatatatagatatttttatattgacattcatatatatatatatatatatatcc

SEQ ID NO: 667 - DNA, 413 bp, Cyanidium caldarium
  Clone ID: LIB190-013-Q1-E1-E4
cacgggcccgcgatattgtacaaccgttgttggctccgtcgtccggaattcctagtcagtttggttgacatttggtatatatggcaactgcagtggaaggaaaacaagaaacagcaaaggacaccaagttgaacaaggcctttgacctcaagtcattcttgaaggacctggcagctggaggtgtagctggggcaatctccaagacggcggtcgcccctattgaaagagtgaagttgctacgtcaagtgcagtattcaaatccgcaaatcccggaggagaaacgttataaaggcatcatcgactgttttacaagagttccaaaggaacaagggtttatctctttctggagagggaacatggcaaacgtcatccgttactttcctacgcatgcccttaactttgctttcaaggac

SEQ ID NO: 668 - DNA, 106 bp, Cyanidium caldarium
  Clone ID: LIB190-013-Q1-E1-E6
agacagaacatgagttatgacataaattatggaagtaatacaagtggtacgtggagtaataatgtatcatatgatcgaaagactggcgaattttaggaaggattac

SEQ ID NO: 669 - DNA, 480 bp, Cyanidium caldarium
  Clone ID: LIB190-013-Q1-E1-F1
cacgcgtccgcccaaacgtccacggacgcgtggggccttttccgaaaacactaaaggaatgaagacgacttggttacaagatattggatatcttattgaagttgtttgtactcaagaaatacaagtgaaaggctatctttatactgtagaccctaatactaacaacttgatattgttgaacgactatgactcaacgacaacaaagtttcatcaactgactctggtcatgggatccgctatccaagagatgaaacgactgcaagtaaccgaagaacctgagcttacaaatagaattagacaaacggaccaagtggaacaattgttagtgcagcaacacaccatggaaacaacacaagtttcgagtgcgatagaacagcgcagaaataaactgttggagctgttgaacaagtatccttggaaaacggaatgggatccgactagtggaattattcgtgtgatggaaggactcgttcgaataga

SEQ ID NO: 670 - DNA, 441 bp, Cyanidium caldarium
  unsure at all n locations
  Clone ID: LIB190-013-Q1-E1-F10
tacggtcagaattacgggccgacccacgcgtcaaaggtaaaggaaaagaaggaagaaccagaaagggactataaccaaaaaggtggatattcaaaagggaaaaagcccagaacccaatataaggtatcaaagtaaagaaaaaaggaaaaggagaagaagagagggtacgcttagaagcagcanaccagagaggaaagcgttaaagcatgaaagaaaagaaatccgaaaaagaagagaaaaaggtaagaaagaggaccgaatcagggtaagaggtagaggagcaagaagagaagagagaatgctgggtggagtagcgaaacaagagaagggaagtaaaaggtaagaaagaggaaaggtttacgagagaacgaagtagaaagaagagagtgtaaggcggcgtcataatagaaatccgaaaggagtangaagaaaagagagaga

SEQ ID NO: 671 - DNA, 476 bp, Cyanidium caldarium
  Clone ID: LIB190-013-Q1-E1-F2
cacgcgtccgcccacgcgtccgaccacgcgtccgcccacgcgtccgcccacgcgtccggttatgattgccttcctcgaagcctctcgttggagtaacttgccgacaaatagcttccacttgcaaaaaagagtggtgcttgcaaggcctggtagcatatctgttgtaaacaggccgtatcctcctcaaagaagcagtttaacctgtatcaaaagcgtgctttccaacgcaactactatagagagtgctgtttccacactaaacaactctaaatttgaacagttgcctctgacgcagcttgccgagctacaagacaaacttcttggagtaacttttatttccttgtctattttcactgtcttgttactggcatatctgggcagaaggataggttaacttcttcgttctataagggtactcgactcgttaggagtcgttcacaatacaagctcctaaatgaatacttcaaggactgtgt

SEQ ID NO: 672 - DNA, 502 bp, Cyanidium caldarium
  Clone ID: LIB190-013-Q1-E1-F3
acggtcggatatccggatcgagccacgcgtccgcaatgaggcagttgggcgtcgctttttgtttattagccatatgcgttgtttcaacaatacaagcacaaggctctagtactcttgctccaacaggagttagttctattcctactagtgctgttacaggcgctacgggaataccaactagtttccctagttcggtttccacgggaataccaaccagtgtaccaacaacatcatcttcgattactatccttactgtcttgcaagacaaccactttgacgatacagtacaagctataaatgcggcaggacttgactctttgtttaacaatccttccgctactcttactttctttgcagcaaatgactctgtatggtctacttctacagcttctcaagctctgagtgctcttccaaccagtgcaccaactggagcctcatctagtagcagtagtagtgcagtatcgttccttagacgtgtcattcttggtgcaacattcaatca

SEQ ID NO: 673 - DNA, 485 bp, Cyanidium caldarium
  Clone ID: LIB190-013-Q1-E1-F8
cgggtcgaccacgcgtacgcccaagcgtccgtgagacatttatggacacttcgactattcttgcagtgctttatggatataatgatgagggctttaaggccccggaaaaccccaaggtcatgaacacagcaaattggttaaggctaaccaaaaaggactggtcccaattcaaccgccaagaaaaacccaataaaggtgcctaatttggaaaatttcccaacgataattatgatggcatcgctacggaaaatggattcaaaggcaatccttggtttctgtgtactttaggaatggcaagatattactttgaattagccaaacgattctcggaatatgcaacgctgaatatatcttctcgttggatgctacctctattagaacatttgcgaacgtcttatttcaagttgaatccatctatgccatccacttttcatgttggagagactcttcagaagccacaattgtgtcagattgcacaagctttg

SEQ ID NO: 674 - DNA, 491 bp, Cyanidium caldarium
  Clone ID: LIB190-013-Q1-E1-G2
cacgcgtccgaaggattattacatatagctgagtggccccttttcaggaagtacctttactttctatgcttatattgtctaaaaagaggagggaagaaaataaaagagcttccctagactctattcagtttcctgtactcgatatagcgagtccgagtccttctgaaaggagtatcgacgactgctccgacgacagtcctttcttgcgagaaaggttgtcttctttgggtctggggattaagacagtagaaaaggatggcaactgtcttttcagtgcagtttctgaccagctttacggaacaccagagtttcaccgggacttacgagaagcagtttgtgggtttttgcagagtcacgaagaagaatacagtagctttgtggaagaagaggatttccagagttatatcagtaatatgaggaagatgggtacatgggcgggaaatttagagcttcacgcaatttctattctgtataatgtgaacgttcgaatc

SEQ ID NO: 675 - DNA, 155 bp, Cyanidium caldarium
  Clone ID: LIB190-013-Q1-E1-G3
acgcgtccgccgacacgtccgaggacgcttaggcggactcttggataactcacgtccatcagcgcagcatcctatgaagaaagtgacgaggtaggactttcgttaagctactatttcaggttctcgatgacagaggtgcattctatcggatatca

SEQ ID NO: 676 - DNA, 381 bp, Cyanidium caldarium
  Clone ID: LIB190-013-Q1-E1-G6
ccgggcaggacgaaatgtcgaagaatcatcggagttattagacaaccgaccaatgtttcgtgccgttcggaacaagaacgacttgttgacaagttactacgtttcacagtcatatatttattgtagaaggctatttcatgcagttgaagaacagccttcgataaacttgggaaatataagggataatccaggtgctcgacaaaaggaaaagagagtaggacgtggcaatggtagtggccgtggtaactattgtggaagagggataaaaggacaaaagaagcgacaaggaggtcacgtgaaaccttggtttgaaggaggtcagacgcctcttttccaaaggttacacagcacaagtttcaaagacttggtatgataatcatg

SEQ ID NO: 677 - DNA, 462 bp, Cyanidium caldarium
  Clone ID: LIB190-013-Q1-E1-G8
cccaagcgtccgcggacgcgtggggcagcgtttgcaatttttgttgtgagtgagtagtgtcatggcagagcaacaaagaagtgagagtactgaagttagaagtgctgcagttcccaccccttgtataaagggttgtgggttttatggtacctcttccactcttgacatgtgctccaagtgttatagagaacatttgcgccaagaggaacaaagacttcaagtggagtctgtatgtcagcagcagcaacaacaacaacaacaacaacaaaagcaggataaggaacaagaaatgactcaggggtccgagttgcacgacttgccctctaaaaaggagcaaggggaagagacttcggtggaggtggctcaacctagccagggttttgttgcggaaagttgccgaggggaaacctcggaatttgtacagtccagtcaacaggaggaaagagttcaacaggggggtgc

SEQ ID NO: 678 - DNA, 430 bp, Cyanidium caldarium
  Clone ID: LIB190-013-Q1-E1-G9
acccacacgtccgcggacgcgtgggcggacgcgtgggcggacgcgtggggctggtcaaagcactaaaggaaaacggactgataaagactgaaagacttgagaaaacactgctcactgtagatagaggctatttctgtaaatatcggccttatgaagactcccctcagcccattggttggaacgcaactataagtgctcctcatatgcacgtcacctgtttggagttgttgaacgagcacttgaagcctggaagcaaggtgctggacattgggtcaggttctggctatttaacagcttgtatgggcgtcatggttagaccaaagggtcttgttgtgggtatcgagcacattccgggtcttgctcgacaatctatagagaacattgaaaagagccaaaaggaccttttggatgaaggggttgttaggatagt

SEQ ID NO: 679 - DNA, 460 bp, Cyanidium caldarium
  Clone ID: LIB190-013-Q1-E1-H1
cggacacgtggggtttgtactcctaagaggtttggtacatcttcgaacggtcgatgattcgacagttgcatatagcagagcaagtgtagaaacttttgaacgcactgaaactacctcgccttttggtcatgttggtagtatctttggtttagcaagttgtcttttttcaatgcctatgccaaaatccgtcatagttgtttctccatttgcgcatttcctatatatatcatctggagatttagagagactggtttccatctatccacagtgcaagttggatttataccgaatggcagcaattgaaatggtcaatctattgtacccggaggctgcacaagctcttgatgaagcggatgaagataccgatagtcgggactggaagtctcgcgaattggatgaagatttcattatggaaaaattttctgataggaaagacacagagctttctcaacgagaagaa

SEQ ID NO: 680 - DNA, 484 bp, Cyanidium caldarium
  Clone ID: LIB190-013-Q1-E1-H2
cgggtcggtcatgcatgttggttagtttctggactttaaggcatctctgttctcttgttggtgtgactgttggtagatattgtgaaagatgggagtcaaagttggtattaatgggtttgggagaattggaaggctagttcttagagctgctttggagaaacagtctgtagatgtggtagctatcaacgatccctttattgatttggactatatggtctacatgttcaaatatgactctgtgcacggcgcttatccaggtacagtggtagcaaagaatggaaaacttgtcgtggatggacacgaaatggcagtgtttgccttccgtgaccctagtgagattccttggtcctctactggagcagaatatattgtggaatcaacaggagtatttactgctgcagataaagctcgagcacatatgaagggaggtgctaagaaagtaatcatttctgccccgtccaacgacgctcccatgtttgtgatg

SEQ ID NO: 681 - DNA, 290 bp, Cyanidium caldarium
  Clone ID: LIB190-013-Q1-E1-H4
ccatgttatcgttgtatggagaccatggttagcgccaccctcagtagtatgtctagagccagcttatggctcacaaggttctttttgtacacagtcattctcgccttttctatccccaaaagatggattgatggaaaaaaaggccaaaatggttgggaaaaaaaccctttaaaaaatgggaaagtcctccacttttgcgcaaaaagtgccactacgatgacggcgacaagcagtaactttaacggaaactcacacacttgcaagtaagtcaaccccttaacgtctcaaaa

SEQ ID NO: 682 - DNA, 463 bp, Cyanidium caldarium
  Clone ID: LIB190-013-Q1-E1-H6
gtccgcccacgcgtccgtgattaccgttggttggcatgtatgaatatttatacatgtatacgattgttctttagggtttgttagaatatatccgcagcttgttgaaaaggaaagggcattgcgtcattgttgttgcagagggcgctggtatggatttattaaaggatgaagttgatatgtccaaaagagatgcttcgggtaatatcaaaatgccagatattggattgttcttgaaagaccacatcagtgcgtggtttaccgagcaagtacgaatggaaataactctcaagtatattgatcctacttatatgattcgaagtatacctgcaaatgcaagtgactggtttgatgtgtggtttattggcccaatcagccgtacatagtgccatggctggtcgaggtggttttacaattggagttatcaatacccaatattccattattccaatgcatgagttgtcct

SEQ ID NO: 683 - DNA, 435 bp, Cyanidium caldarium
  unsure at all n locations
  Clone ID: LIB190-013-Q1-E1-H8
cccaagcgtccaggaagggtatcgccatggcaaaggcagtgagaattggtgctgaaggttacaggttaaagttggacggtgcagttcaagagatagacggtcgttctgtagttctggtagatgtggatagtattacccctctcatgtttggaggtagtatgaaagaaaaggccaaattgttggatgccaagtttctaaggaagtattatgaggagaacaaggacttcttcttcttgtcgactagagaagagaagaaaatgtttgtgacgttgcaacttgccagggaatatgcagagctggtagatgaccaattcttgaagggcttcttcgagaaggctctggagtccgctcagaagacgttttaatttgtcaagtanagtgtagtgtgcgtttttctgtgtgtatttgtctctgtgtgtgtgtgtccgtgtgtgt

SEQ ID NO: 684 - DNA, 497 bp, Cyanidium caldarium
  unsure at all n locations
  Clone ID: LIB190-014-Q1-E1-A2
atggtccggctatccngggtcggaccacgcgtccggagtaaatcacctccgtgaatctgcgtccatgtttgccttcattacaaactcatgccaagtctttactggaagaaacactattaccaaattcatcatatcgcagcacgctaaaggatacagaaattgcctatctatacatatggctgcaaagtctagagcgcttccatttctggaagccccaaaaaagcttgacggaacgattccaggagatgcaggctttgatccactgtatatttccgataatatgaacctggactatcttcgagcttccgaaataaaacactgtcgagtagccatgcttgctgccctcggttatgtagctcaagaatttattcatcttcctggagatgtctttagcgagaggcatgccttggcagccattcacaaggttcccttggagggttggatacaaattatccttttcatcagtctgattgaaatagcgacatttcgtactactt

SEQ ID NO: 685 - DNA, 468 bp, Cyanidium caldarium
  Clone ID: LIB190-014-Q1-E1-A3
acgggtcggcccaaacgtccggaatggcaaccgcaggttcgtctgttacatatccagctgtcgtgtcgttatctcttgcgagattagctccggtaggacgacgctaccaagccaacttgcaatcatcgagatgctttgtcgattgatagttcaagtatattttggaaaagaaagtaatgcagggacgacttggcttgcatcttctcgtttgtttgccttttgttgctactgctataagtgctcagagcgacccagagtgaaactgaaccaaacgagcgaggttgtgctgtgacagagagagagaagaaagttgcagaagaaagacggctttaagtcttttcattgcaacaagtgcaacacagataaatttatgccgcaggacaaaataactagtcactaagtataaggtgctttggtgcagttcattctagtagcacaatatcatcgatgagctactacaagacaaca

SEQ ID NO: 686 - DNA, 499 bp, Cyanidium caldarium
  Clone ID: LIB190-014-Q1-E1-A4
atggtcggacatccgggtcgatcacgcgtccgcacggacaaaactcgtgaagcaggtatgagttgcctgaatgaaatgaagtgtcattggccagaatacgcttcgagtctaatggaaaggctcgatccttctctccaacgtcgtgctgtgaattctctgtcaacaaactcagacaaatcaggttcgacgaagcagagcaaggatcgcaaaactatcaaagagctgaaagccgaggccttggagactaaaaaaagcggcttgaatacacgctccgaaaccgtggcgcacgacgaagtaacaactctctcctctgcaatatctcaagtgagaattgacggagccaaaagtagtggcaagtgtgctgcagagaaagaaaactgcaacaacgtcattcctggcgacaacaaacagacaaggtcacaagcaatcggaacccgcaatcttcgaagtagaacaattcccaagcccaattaaagtacttgttttatatttcgctgat

SEQ ID NO: 687 - DNA, 222 bp, Cyanidium caldarium
  Clone ID: LIB190-014-Q1-E1-A5
gtcggcccacacgtccgtgactattatttggaaatcgttttttctattttggttgtatttgcattactatcttgtatatacagttctaacgtgttggaatagattccattggcacttattcgtacaaatgcatattttgatcaattagtaatggttgaaaatgcaattcggggcccgtaggttcacagcggttacaacttttcctaaggaaaccttaggaaa

SEQ ID NO: 688 - DNA, 367 bp, Cyanidium caldarium
  Clone ID: LIB190-014-Q1-E1-A6
tgttgacggtggccaattatgagaatacgtcgtttgaacgaacaaggagaagaagaagacaaagaagacgaacaagaagaaatgcaaagtgaagagttgacaaggagttgttcggaatttcttctttcgtattcttccgaaatggtagactgtataacctcattgagcgatgacgacgaagagaaagagtcgttcgtggcttctcgacttggacaaaaactgggaaagatgctggaaagttatgcctcgcattgtagtggaaaaaataagactttgttgtttcgtcatgttccggacgacacaccaacgaagcattggcttatcgacaagttcaagttaccaacgagaaccttacgggttaccttgt

SEQ ID NO: 689 - DNA, 445 bp, Cyanidium caldarium
  Clone ID: LIB190-014-Q1-E1-A7
cccacgcgtccggtgagtgagaaatgttccgaatcgtttcctttcctacgactccaagtaaagaccagaaaccaggaacttcaggtttacgaaaaaaagtggaaacattcagaaaacaacaatatttggtcaactttgtgcagagtattttcgactcgcttccagatatccaaggaaagacacttgtgttgggaggtgatggaagattctacaactccaaagcaatacgtattattgcccgaatggctgctgctaatggcgttggaaagctgctgatcggaaaggatggactcttgtccactcctgcagtgtctgcgatcatacgtcaaagaaaactatatggaggaattatattgactgctagtcacaatcctggaggagcggatgaagactttgggatcaaatacaacgtttcaacggaggtccagcactggaaaacctgact

SEQ ID NO: 690 - DNA, 457 bp, Cyanidium caldarium
  Clone ID: LIB190-014-Q1-E1-B2
ccgggtcggacacgcgtccggccaaacgtccgaaatagtgagagtaatggccatagtggaagtcaaagcgggaatctgagaggaggacagccacgttggaactgacaataggtccaaacaagagacgtcaccagtggggacaattgtgcagagtacagggaaatatgacccaatattgaagactgtagtaaacagtggaggaagtaaaaggagggattgaagggaagttatggcggaaacacgtgccagcagcagtggtaacacctgtgtagcaagctttgagcaaaacatctgggtgtaaaagtcgattaatagggcaagtgttaaagggaatggaaaagggagaaggaaggaaaggatgaagtgcaggaatctctacagaaatgcctgaaggaaagcaaaggaagacacagtagatgacgcgataaatcatgcgaagtgacacgggttatgaacc

SEQ ID NO: 691 - DNA, 165 bp, Cyanidium caldarium
  Clone ID: LIB190-014-Q1-E1-B3
cgggtccgacacgcgtccgacaaaaaataaaaaaaaaaaaaaaaaaaaaaaaaaaaaaaaaaaaataaaagaaaaaaaaaaaagaagaaaaaaaataatggatcttcaaaaaagtaataaaggggagaactcgggtggcgctttcaatagtttggtgtcttgggt

SEQ ID NO: 692 - DNA, 355 bp, Cyanidium caldarium
  unsure at all n locations
  Clone ID: LIB190-014-Q1-E1-B4
gggtcggacacgcgtccgcccacacgtccgcccacgcgtccgcncacgcgtccgcccacgcgtccggttttatgaaccagttattcgatggctaactccatccttcgtatctgtgactgtgccacaagtgatgaagacgacgactgacgaagattcgttgtggagtacaaaatctggatatatcccacaagtcattgtggagagcaccaatggacataaganaaagaatattcgtcgtgaaaagagccaacaattggaaccactaccttcattatccgatgtgattcgttccgttggtctggtggcagtcgcacttcaagaaaaccaacgaccagcggacaaggactcgaaaacg

SEQ ID NO: 693 - DNA, 314 bp, Cyanidium caldarium
  Clone ID: LIB190-014-Q1-E1-B5
tccggtaaaaagatgatagtgtgtggatataactgagtatcacgaagaagagacggactatatgaggaaagaacgatcaaggaattaagattactagaaggagtaatgtgcatgagggcacgaaggtacttgaacaagatagtgtatagcgcgtatcttttgcacaatgtcccagcgagtcaaagaggaagcataaagaatgataaagaagtatccacttattaccctaggctagttgatcttatgctgtccaagcgaattcacgctgaagcagtatctgtggaaaaagatttgtaagagatcgcataaggggt

SEQ ID NO: 694 - DNA, 437 bp, Cyanidium caldarium
  Clone ID: LIB190-014-Q1-E1-B6
cccacgcgtccgcccacgcgtccgagcatcttggttgcgacggagtttattgtggttgtcactgttgagtcgtttggtcttacaatatgtcttcgcctagtaaacgtcgtgaaatggacctcatgaagttgctcatggcagactatgagttggagctctcggaagagaaccaagcgagtgacttttatgtgaagtttcatggtccttcggaaactgcttatgaaggaggagtttggaaggttcatgtgcagctaccggacgcatatccctacaagtctccttctattggttttgtgaataagatatatcacccaaatgtggacgaagcgtccgggtctgtttgtcttgacgtgataaaccagacgtggtcgcccatgtttgatttggtgaatatttttgaagtttttcctcctcagttgttaacctatccaaacccc

SEQ ID NO: 695 - DNA, 284 bp, Cyanidium caldarium
  Clone ID: LIB190-014-Q1-E1-B7
gaacagatgccttcccagcaaatacaatactctgaaaaatattatgacgatacctatgaatacagacatgtcatcctaactccgggcatagcaaaactggtccctaaaaacagactaatgtcccaagcaaaatggcgcggtctcggagtttaaaagtcaaagggtttggtatactatgcaaaccatagtgcaaagcccaatatattgtttttctcaaaaccccaacaaaaaaaggggcaacagaatcccaataatattggttgtgaaaaacaacaaaaccccca

SEQ ID NO: 696 - DNA, 153 bp, Cyanidium caldarium
  Clone ID: LIB190-014-Q1-E1-C1
gggtcggaacacgcgtccggacaaaggaagtaagagtaagagaaggagtaatgtgaatgaaagcaggaaagtatttgaagaagagagtgtaaagcgcgtaccttttgcataatgtcccagcgagtgaaagaggaagcaaaaagaaagaaaaag

SEQ ID NO: 697 - DNA, 411 bp, Cyanidium caldarium
  Clone ID: LIB190-014-Q1-E1-C12
agaattgagcttcctcaccagaagaaatggtctactatttcacaacacacgatcctgaatatattatagacactgggtaaagataagtttgaaaacgaacacttacttcagtatggttgggaagaagacgtttggttccacgtggataagcattcgtctgctcacgtatacgtgagaatgcctccaggaaaaacgatagaggatattccccctgatattttagaagattgtgcgcagttagtaaaatataactccatataaggaaataaactccacggtgttgtggttgtttaaactccctggagcaacttgaataaaacaggaaatatggatatcggacaagttggttttaaagatagaaagcgtgttaagagtataactgtagaaaagaggaagaatgatataattaac

SEQ ID NO: 698 - DNA, 475 bp, Cyanidium caldarium
  Clone ID: LIB190-014-Q1-E1-C3
cgggtcgatcacgcgtccgcccacgcgtccgagcagttgtacattcaacatcatcaaatgccaaagggaggaaagaaagattcttcaaagaaagaagccacaagtaaacctgcagcagcagatgctacaaagacgacagaaaagtctggtccggaagccaagttgaagggaactggtgcaaagaaacaataaaaagttgactatgcatgttcctgttatgttttgtgagttctgtttgatagtttccagctattcttttggtagtgaataaagagaaaattttttatatttaaaaaaaaaaaaaaaaaaaaaaaaaaaaaaaaaaagagaaaaaaaagaaaaataaaaaaaaaaaaaagtaaaaaaaaaaaaaggtaaaacttatgtaaaaagagaagaaacagaagaacaggggataaacggtcaagcaacacaagaaatgaaaaaaaaaagggggggccccccaaagaggttc

SEQ ID NO: 699 - DNA, 440 bp, Cyanidium caldarium
  Clone ID: LIB190-014-Q1-E1-C4
cgggtcggacacgcgtccggattaattatcatggaattggtatgggaatatttccaaagagagaatggatatttcctatcttatggggttctccttgttcctattcgtattttccggatactcgagttgtcgagttgcccatcgttagtggtgaagaaacagttatggttgcaggtttacagtccagaaatggtgctcgagtgttattaacaggttccacagatatttgtgccaatactttacctcataatagtgcgttttgtagttgggtcgtccgttgggctttgggacaacgcggaatgcttcgaattcggaattggcgacatcgcaccctcatgaaccaatccacgacccatgcggtttccttttcttcttcgaatcctacgagctaccgagtagaagatgaagtagagttttctatggatatggaagaatgggat

SEQ ID NO: 700 - DNA, 132 bp, Cyanidium caldarium
  Clone ID: LIB190-014-Q1-E1-C6
ggtcgcggacacgggtcggacacacgtccgggtaaatttaatcaccaacatcccaatcgaagatgccgtggatgacaatatctaataggggttctccttgatactggatgcgtataattccgggttattcta

SEQ ID NO: 701 - DNA, 413 bp, Cyanidium caldarium
  Clone ID: LIB190-014-Q1-E1-C7
cccacgcgtccgagaaattgttacctgccttggagcagttgaaatcctcttttgataacaaagcgaaggaatttgctgaaaatgtgaagataagacgaactcatttacagggagccgttcctctttcttttggtcaagagttttctggatatgttactcaactttcctatgcccaggaaaggttgcattcatgcctaccccggctatattatttagctattggtggaacagctgtaggtactggtttgaatactcgcaagggctttgacgagaaagtttgtgctgaaattgccaagtatacaaaattaccttttcaacctgctcctaataagtttgaagcccttgcagctcatgacgcattggtagaatgtaacggaatattaaacactatagcatgttccctaatgaaaata

SEQ ID NO: 702 - DNA, 453 bp, Cyanidium caldarium
  Clone ID: LIB190-014-Q1-E1-D2
cgggtcgaatcacgcgtccggaggaaggcgagcattgggtttcttcccgagagagaaaacgagtgcaaaagttgtctttcgatgtctagtgttgatgcgcatccaacaatagtttatcctcattatgtcagagctttagatgaagaaaaagctcaactaccatctagttttcctcgagaatattcggaagagtttcaacacattttacccaagttgttgcagcgcggttttcatatactaaccaaactgaacaaccaaaagggtaatttatcaaatatttcgaaaaactttgtgttgagccatccacatattcacgtcgttattcttcgaagagccctggatggtgctgttatttacctcgcttacgtgggttcccatgtacaaggtccttcgggttttatgcacggaggagctacagcagcactgttggacgactgtgtcagttctgcagtt

SEQ ID NO: 703 - DNA, 326 bp, Cyanidium caldarium
  unsure at all n locations
  Clone ID: LIB190-014-Q1-E1-D3
cgggtcggacacgcgtccgctgtgaaactaaaggatgtagtggataaccaattcattgcgattgcagattcctgtatcaagaagctcaacaaggaatggaattatatacaaaatgttggactaagtcaagtaagtcctgtttcctggtattccatcgtccaacagaccgacgagcaaatggtgatattgaatgcttatgtccaacacaagtttgtctctcatcgttttgtcgaagaaacaaggaaaaccacatgaaaggaaaaagcanatgggataagatgtggacgtgtttattcgcctatgaagaagaaaactggtgaatacaa

SEQ ID NO: 704 - DNA, 464 bp, Cyanidium caldarium
  Clone ID: LIB190-014-Q1-E1-D4
gggtcggactacgcgtcgggcattactttctggctatgggacaagagatgatcgatcatagcctggcattggttattcttttgtatttttgtgctttagagtcgtttcttttctttgctgtcatcgctcaaacgaaaagtcaggaaccagaagtacacaacggtattgctagagcctttggatttctctttcttgcagaatgtctttgtttgctatgttgggtagtttctattcagttatctacgagatttagtgtgcagtttctgaatagagtttttatcattttctttgtacttggattgattgtttcttgtataggaggaggttacgttgctatcccggaatggagacgtcgtagtttgcgtcatttcattgtagttttgtgttttcttgccacggttctctattggttttctttttcatcgtcgttgggagttgaattggatattccttttatagacatc

SEQ ID NO: 705 - DNA, 389 bp, Cyanidium caldarium
  Clone ID: LIB190-014-Q1-E1-D6
gggtcggcccaaacgtccggctaagtcggaagagtcagacaacgaaggcgtggagatcaagttagagactgcacctcatgatcctcgcttccaaactactaatcaagccaagcactgttggtcgagatacatcgagtatcacgcttgtgtgaaacaaaaaggtgaagaggacagcgagtgtcaaaagtttaagcgatggtacaagtcactgtgtcctatggaatgggtagaaaactgggacgaacagcgtgccaacggtacctttcctggtcccgtgtagttgtactgttccacgtgggcccttttggagtttaactgacctgttgtcggtattgtccgtatggctttttttgttcaataaagttttatgtggtagattttatgttcgc

SEQ ID NO: 706 - DNA, 318 bp, Cyanidium caldarium
  Clone ID: LIB190-014-Q1-E1-D7
cggtccggcgaacacgggtcggcccacacgtccgcccacacgtccggaacgtgctgtgaagtgagagaacgtacgagaaagccaagtgaggaaaagaaggcaagtagagggcggcccgagaaaggagagggcgtaagacgtgatacagagtaggaagaaaagagaagagagctagaaaggaggtaaaagaagagtaaaaggactagaagaggtacggaattcacgaggaaggagcgtgaaggaaggaggaatcccaagtaatcgaggaagaaaaagcttcggtgaaagcgtgaacggattttgtacacactgcccgtc

SEQ ID NO: 707 - DNA, 298 bp, Cyanidium caldarium
  Clone ID: LIB190-014-Q1-E1-D8
acgtccgcccaaacctccggaatctgctgtcaaatgagagaacatccgataaagccatgtaccgcataatacgcacgtccaaggcagtcctcaaaccgagcaggcttgatacatgatacatcgatatgcacacattgtatgagacctagaagtgaagtagacaacgagtatcacgactataagcggtaccgcattcaacaggaacgaacgtgaaggaatggaggaatcccaactaataccggaacaaaaagcttctttcaaaccctgtacggattttgtgtacaatgctcgtcaattt

SEQ ID NO: 708 - DNA, 428 bp, Cyanidium caldarium
  Clone ID: LIB190-014-Q1-E1-E12
agacgacatctgcttccgaacactgaaactgagtaatccaagctatggtgaccttaaccatttggtttcggcagttatgtcaggaattacctgttcgttacgtttccctggacaactgaatgcagatctaaggaagttagcaaccaacttgattccatttccacgtctacactttttcatgattggattcgcacctttgagttcaccaggctctcaacaataccgttctgctagtgtttctgagctgactcaacaaatgtttgatgcgaagaacatgatggcagcatgtgaccctcgtcatggtcgttacttaacagctgctgcgtatttccgtggaaatatgtccacgcaagatattgatgatcaaatgtttaatatccagaacatgaattcttcctacttttgtaaaatggaatcccaaacaacat

SEQ ID NO: 709 - DNA, 307 bp, Cyanidium caldarium
  Clone ID: LIB190-014-Q1-E1-E2
cggtcgatcacgcgtccgcccacgcgtccgcccacgcgtccgaacaattaaaaaagttcaaggacaaattgtagataaaaaagaaaaaaaaaaaataaaaaaaaataaaagaaaaaatggcggcggtccaacactatgaatgattgagtgcatgcttcttgaatatattcgtttatgcaggatataccttcatgacgtttaggtggtggggtttcagatgcgtcaccactgcttgaggattggggttcgccttgattatggaatatcagcttatgctagtttggctggggaacttatgcctgagaag

SEQ ID NO: 710 - DNA, 483 bp, Cyanidium caldarium
  Clone ID: LIB190-014-Q1-E1-E3
ggtccgacatccgggtcgagcacgcgtccgccgacacgtgggcggacgcgtgggcggacgcgtgggtggttggggtgggaaaccacaagatggcttttcaacaacacgaacaagatgaacaccaagcaaaacaaggttggaagtcgatgatatcaccaacctattggaaatcaaatgtatctgtgttatggaatgaacgagtgaatgtggctcttccttcgtgggaaacggtatccaaagccagcgagacgataagcagacaggtaaaagagtcggcaaaggaactaggtggtttattttctgcagaagaagattgtttacaagcaacatcgtcatctgtaaaaaaagcaccttgggaagtgttgacaccaaaggaaaagccttttgcaaaagaaatagaagaaaaagtactccatatgacgagagaatgttatcagtctaagaaacaaagagaagaaacgttcctttctctctcttcgttgc

SEQ ID NO: 711 - DNA, 316 bp, Cyanidium caldarium
  Clone ID: LIB190-014-Q1-E1-E4
gtccgccatccgggtcgatcacgcgtccggcaccacataagccatatctccaccaatcaattcaagttgttgtctacaagccaactgtctacatagtatacatatgtgacttgtcgttttattgcaacaaggcatcaagctcctaaacctaacatttgtcgaactcttttcactgtcgagtcttgagacaagtcgtacggttggtctttgctgggtatctccaaaactgccggaataggagcacgatagctatgcacaagctcacgaattttctcggcaaccttgtagctatattaaaacagcataatatatctac

SEQ ID NO: 712 - DNA, 439 bp, Cyanidium caldarium
  Clone ID: LIB190-014-Q1-E1-E6
attcacacagagtgtagctcaaatgtggacttgaatttagcgatgagttttcggttttcccctggttctcgactcctgttggtacgacaacttgagtagctttctctccttttgtcaaagcagtcttcttgcgtccagtcttttgttcgcgattagcctgcttgatttgttttttaaaaagttacagagtggtgtatcggtccctatttgttgtgttcccttgaacaaagagaaataggttgtttaaagcaagacaaggaagcgtttgatggactaaaaaaaaaaaaaaaaagaaaacataacaaggatgtacaaaatcaagaaaaacgttcagtcgagatccgacgccataagaaagaaaaagctaaactaatataaaaaaaaaggggggggccccccaaggggtctaagtttaacttcccgttaaagggaatttaaa

SEQ ID NO: 713 - DNA, 368 bp, Cyanidium caldarium
  Clone ID: LIB190-014-Q1-E1-E9
cagaagaggagttatgagagaaaagatggaagtaatagaagtggtaagtggagtaataatgaatcatatgaaagaaggaatggagaatataaggaaggattacatgaaggaggagataataggagaaatgataaggtggatatatatatcgataataagtgtgatagtaatataaaggaggagaaagagaggaaagaggtgtatgatgcaggcaaagaagtgacgcagtagatcagagagtaacacatgcaagtaggtaaagcgaacgggtgagtaaagaggtgtgaaagagtggaagaacatgaaagcacagaagaatgtaagaaatggttagagtaaaaaccataaaggaagtaaaagcgggaatc

SEQ ID NO: 714 - DNA, 492 bp, Cyanidium caldarium
  Clone ID: LIB190-014-Q1-E1-F1
gtcggcaagccgggtcggaccacgcgtccggaagacatttcatggcacccaaggaacgtagtaaaccaaagagtcgctcttctaaagccggccttcagtttccagttggacgtgtaagtagattcttaaagaatggaaactatgcagaaagagttggagctggagcacccgtgtatttagctgcagttttggaatatttgactgcggaagtgttggaactggcaggcaatgcagctcgtgataacaagaaaacccgtatagttccacgtcatattcagttggcagttcgtaacgacgaagaacttaacaagctgttgggcggtgtgactattgcttcaggtggcgttcttcccaacgtccatcccaatctgctaccaaagaagaaggcaaaggaagacatgcagtaaagttttccttgagctggtgtttttgaacaccacctttataagaaacttgtcactttattggaatgtattgaacatgtgaaacgta

SEQ ID NO: 715 - DNA, 134 bp, Cyanidium caldarium
  Clone ID: LIB190-014-Q1-E1-F2
cgggtcggacacgcgtccgcccacacgtccgcgcaaataagaaatgctatttggtccttggagaacttgaccaaaaccgattgcggttatgcttctattgcggatgtccaacaacatcaacgaggagatatgat

SEQ ID NO: 716 - DNA, 372 bp, Cyanidium caldarium
  Clone ID: LIB190-014-Q1-E1-F8
cccaagcgtccgcccacgcgtccggaagcatcgttgtcgatatttttagaaaactttgctagcacacttggtggacgtcagcaattggaaattgctgagttctcggatgcgttgttagtaataccaaagacacttgctgccaatgctgctttggatgctactgaaatgatatcaaaacttcgagcagttcacaatgcagcacagtcagactctaacaagggcaatctttcacatatgggcttagatttggaaaacggtctgttgagggataatttggaagcaggcatcttagaacctgctatgagtaagatcaagtctattcagctagctacggaagcagcgattaacatcttacgcattgatgaccttatc

SEQ ID NO: 717 - DNA, 425 bp, Cyanidium caldarium
  Clone ID: LIB190-014-Q1-E1-F9
caaacggaaaggttgcaaaactttggagtgcgtccacgattgcagagcacttttggcttgcgtagacttctgtagaattagactcgacacttttttattttgtactttgagtagatgagagctgtgattcaacgtgtcagccaagcttccgtaactggaggaggaaaggtcgcttccattcaacaaggtattaacttgagacagggttttatgagtaaatagtatggagtgccaggtctctgcgtacttttgggcatcgctgcggaagacacggaggaagatcttgaatacattgttcaaaagacacttcaaatcaaagccttttcaggtgaagctgaagaagaaagatggaaaagaagtgttgtcgatatacaaggtgaaatactgttggtatcacagtttacattacatgctgcgttcaagaa

SEQ ID NO: 718 - DNA, 402 bp, Cyanidium caldarium
  Clone ID: LIB190-014-Q1-E1-G11
ttctcggtgaaatctttggcttcactcgttcctatcttttttggtttggttttggcttcttttgcggaatcaaacgttactgcagaggttgagaattttggaaccaaaaggtcgattctttttggttcttttgcgagcatattgtccaaccttttaggagtattccactctctgtttgcaaaatcaatgctttcaaagcaactgtctccattaacactacagacttatcagtccggcattggctgttttttagtgtttcccttattattatacgattggaagttcttccacgaattgaaagatcgacaagtcttagcaattctcctcttcaaaggttcgctttcatttgtacagttacacgttgccttgaaagtgttggacaagatgtcaacagtgggtttt

SEQ ID NO: 719 - DNA, 453 bp, Cyanidium caldarium
  unsure at all n locations
  Clone ID: LIB190-014-Q1-E1-G2
acacgcgtccgcctaaattctttgtgcatggacaatggttgcaaagactgctctgagttgcctctttctctctctccttatcgctgccgcagttgcagccgacgtagtttcagaggagagatggggatatgctcagcaaacccaacaacagcaacagtgccaacaagtatgtaaacagtatgcatactatcagagtccagtctgcacttccgtaaccacacagagcccatactggacccaatgctcgaagactgtgcaaacctttgtcccaagccagtgcagtacttatacccaatctcctacatggacctattgcagcacctacaccaccactagcgtaccatctcaatgcagcaaggccgtgactacttatactcaaacctgctgtgcttatgcncaacanacttcctatgcagtcagtaccgagcaatatgttcaggaaactgtatccgc

SEQ ID NO: 720 - DNA, 456 bp, Cyanidium caldarium
  Clone ID: LIB190-014-Q1-E1-G4
gggtcggaccacgcgtccggggaggatgacgatgatgagaagaggcggttggtggttggttcgtgcggtaacaactgcaaccacaaaaacaaatatttggaagagagcttcgactagtatttatgacagtaaatgtgagatgagaaaacccaattggaatacttttttgcgatcctattgtacttcttgggaacccaaacctttagaagcctttccgttaggttctggcatagcctttagtaaaaacgtgtatatggatcctgaacaagttacggagcgagtattggaagttgtgaagttgtttgaaaaggtggatcctagtaaagttcatcgagaagcagattttgaaaaggacttgggattggatagtttggataccgtagaacttttgattgctttggaagatgaatttgaagtggaaatacctgatgaacatgccgaacagatgagcaattg

SEQ ID NO: 721 - DNA, 354 bp, Cyanidium caldarium
  Clone ID: LIB190-014-Q1-E1-G7
cccacacgtccgcccacgcgtccggtattaaaaaataacggttatcctgcagaaatagcatctctagtagtaggacgtggtgcgattggagagaaattggccaaagatagccgattgccgctgatatcctttaccggatcgaccaagacgggacggcatgtgtcaaaactagtgcatgaaagacttggaaagactattttagagttgggcggaaataatgcagttattgttgataaggactgcaatttagatatggcacttcgagctgttttatttggtgcggttggaactgctggtcaacgttgcacatcgacaagaagactttatcttcatcattccacctattccaccttt

SEQ ID NO: 722 - DNA, 370 bp, Cyanidium caldarium
  Clone ID: LIB190-014-Q1-E1-H1
cgggtcgagaccacgcgtccgcccacgacgtccgaagaaagagtcgaaaggctttttttttcgtggttcgatgggtggattgtgcaatattttttgacaatgaaaaaaatattgtacatctactgaaatgtaagaatgaatgagaggaaagaggtgtatgatgcaggcaaagaagtgacgcagtagatcagagagtaacacatgcaagtaggtaaagcgaacgggtgagtaaagaggtgtgaaagagtggaagaacatgaaagcacagaagaatgtaagaaatggttagagtaaaaaccataaaggaagtaaaagcgggaatctgagaggaggaaagcacattggaactgagaaaaagtcaaacaagaga

SEQ ID NO: 723 - DNA, 454 bp, Cyanidium caldarium
  unsure at all n locations
  Clone ID: LIB190-014-Q1-E1-H10
gggccgacccaagcgtcagggaaattgttggattctttgtcgagaatgccggctcccttgattcgtcgcaagtctttgaaaaaaagaaccaaaaagttcaaacgtttccagtcggataggtttaaaagagtcaaggaaagctggaggaaaccaaagggaatcgactgcagagtgcgtaggcggttcaagggttctactttgatgcccaagatcgggtatgggacagataagagaacgagacacttgttgccaaacggtttctacaagtttgtagtaaataatgtgaaagaattggacgctctacttatgttgaaccgcaaatatgcagcagaaatagcgcacggagtatccgcaaagaagaggaaggaaattttggaacgagcggcggagttggatatcagagttaccaacgcacgtggaaagttgagagctcaggaagctgaatanaaatcgt

SEQ ID NO: 724 - DNA, 344 bp, Cyanidium caldarium
  Clone ID: LIB190-014-Q1-E1-H11
ccacgcgtccgcccacgcgtccgccttggtgggcgactctgggtactggtgcgtttgttaatcgacccccaacctttcctccctgttggcacggaaaggtagggggcggtttggactcaatttccgtgtaacttctcaattcacttgtaataccacgctgaaaagttgagttcgttagctccagaactaaaccgggtcagatcatatgttaaccgctcacctggaacttcagtccacaagatcagaacttttcgtcctcagccacaggaactgcttaagagaagtgattcctcacccttaacaatgattccctacgggaagttagctcaagtaacgctttttgc

SEQ ID NO: 725 - DNA, 432 bp, Cyanidium caldarium
  Clone ID: LIB190-014-Q1-E1-H12
ggaagagattcttttggaacttctgtggaagactcacttttgggaatatcttcttcccctgtacaacttactaccaaggaatcctcatctatcatatcgagtatgcttcgtttcaaattggctctactggagagttttcgtttcctcaagtaatacttttgtgcgtgagactgacactgactggcacttctagttccaacataatctgcaatctgtatccagtttccgtgaccaaactttttcaaagctacaagaaaacgctggtgttcatccaacttccaggcatttttgaattttcttgaactgctttgcaacggaaacaacttatccgtaaagaatggaccggaatattccgaacagttatttggaacgtttcttgttgtttcatcattctgcttgtgaaacggacactgaccaaagcgcgcacaatat

SEQ ID NO: 726 - DNA, 362 bp, Cyanidium caldarium
  Clone ID: LIB190-014-Q1-E1-H4
cgggtcggaaccgcgtccggcccaagcgtccgggaaatcctgttgactgacttgtgtggctatccgctgagtggaatgacaacttttgctcctaaacttgaaacccgttgttcaaagaaaaatgtagtgtgtaagcgataaggtgaccaacgacttgaggaaaccgagagattccctttaccacagcaactaagcatgtactcaagggactcgaagacagtcaaaaaacgagagccagacttagaaatcacatataccatgttttggccatgtactgtctggatgcttgtgactcattcaagtacatcacaagctatcatttcgacctaatccgtcctgcgcgttcgttgaacacacaatac

SEQ ID NO: 727 - DNA, 258 bp, Cyanidium caldarium
  Clone ID: LIB190-014-Q1-E1-H5
ggtcggtagtccgggtcggccacgcgtccgcggacacttggttggaaagaaaaggtggaattggtgctgcaaaaagaactccgctaaggtcaaaacctcccctttttgcaaaaagagaaagggaagaagcaacaacgaaacattcttcacgtcctgcgtcttcgctggccaacgtgaagaataaccctacgagtggaaaccaaagagagaagaccaaccaaacgacgacccctccaactcagaaccctagtatgacct

SEQ ID NO: 728 - DNA, 479 bp, Cyanidium caldarium
  unsure at all n locations
  Clone ID: LIB190-014-Q1-E1-H6
accggtctgggattccccgtccgacatagtctcagtggcagccataaaataggttaataatttggttactctgtttcaatacagaatgaataggactagttggaggtaacaaatcgtatcctgagtaaatctttcttcagttgggacgctatcctggaattacataaatactagctcacctctatttcaagttcgcctgaattgcacaactttaagcaaacatacttctttagatgtcttacagtgatatccggtggcactcttaagaacggtttccccattgacggcaaattggaaccttggattggtgaaagctgtaacaaacaccagtggctatttgtatttctaaaaggcancggagcaacggggtaagaaaggttgtcgtattctgcaactgacgctgctgtttttggcgtttgctgtttctccgcttgattggacggtatcgatatcgcctggaactcctcaacatcttcctt

SEQ ID NO: 729 - DNA, 406 bp, Cyanidium caldarium
  Clone ID: LIB190-014-Q1-E1-H7
cccacgcgtccgggttgttttcttggtagcagttgtacattcaacatcatcaaatgccaaagggaggaaagaaagattcttcaaagaaagaagccacaagtaaacctgcagcagcagatgctacaaagacgacagaaaagtctggtccggaagccaagttgaagggaactggtgcaaagaaacaataaaaagttgactatgcatgtgcagtcctgttatgttttgtgagttctgtttgatagtttccagctattcttttggtagtgaataaagagaaaattttttatatttacacaaaaaaaaaaaaaaaaaaagaaaaaaaaaaaaaaaaaaaaaaaaaaaatgaaaaaacacaagaggaacaaagacggaaaagcaaaaagcaaaaaaaaaaaaaaaggggggc

SEQ ID NO: 730 - DNA, 231 bp, Cyanidium caldarium
  Clone ID: LIB190-014-Q1-E1-H8
tacgtagcacgattgtcccaactatgcatttgtttcttccagaaaaggttgctctcgtaaccgttattagtattgttgttgcaggagttggatattttgcatacacacagtggaatagaaagtcggacaacgacaaatcggacaaggaaaaataggaagagctgataggactgctttgatattgtggaccagttgcctttgttgcgaataaaaaataggtgttttttgtcc

SEQ ID NO: 731 - DNA, 325 bp, Cyanidium caldarium
  Clone ID: LIB190-015-Q1-E1-A10
aacgactcaccaaaatgtcgtacagcaacaaaacaaaaaagaacacacgcgagtccaaaaccgagtcgagtcaagaacatagttatgattggagtgcagtttgggaaagagtgcaggttggaggttgtgcaggaagtttagagccgtgggcgccttgtgggggtatagttcacaaagtgatggacgagattcttcaaaaggaagcaaaggctcgagccgagggtaagcctacatacgtggatcccaagacgggatacacggttctcactgcaaaatacctggcgtccacaggatactgctgtgggaactttttttatactgccca

SEQ ID NO: 732 - DNA, 278 bp, Cyanidium caldarium
  Clone ID: LIB190-015-Q1-E1-A11
cgcgtccagttatcctggtagcagttgtacattcaccatcaacaaatgcccaacgcaggacagaaacattcttcaagtaaagaacccacaagtaaacctgcagcagtatatgctacagggacgggccaaaattctggtcccgaatccaaggtggggggaacttgtgcaactaaacactccaaagttcactatgcatgttcctgttatgttttgtgagttctgtttgaaagtttccacctattcttttggtactgaatacccacaaaattttttatcac

SEQ ID NO: 733 - DNA, 294 bp, Cyanidium caldarium
  Clone ID: LIB190-015-Q1-E1-A12
aaccactcttccgcccacttcgtccgccgacaccaagaaaagaaacgacacatatatccacaaagtttctggtcattccttaattggtttaacagcagcactctatactaaataggagacttccaaatatcgttcgaaacctaaagggggggaactgatgaaaccagaaaccctgatttggaacatacagcacccaaacacacccaatccattacctttcaaatcatccacaccttcgtatagaaatccactttacaacaacaactttcttaaactgcactcgatcacgattcc

SEQ ID NO: 734 - DNA, 386 bp, Cyanidium caldarium
  Clone ID: LIB190-015-Q1-E1-A5
gtccacccacgcgttcgaacgctacatcaaggaaggaacccgcatcagctatggagagaaaacgaggtcctcttcgttccaaagctgccaataatgttaaaaacgtagagcaaaagaatggcgtccatacagaatagagagataacggagtctcaaaggcagagatggaaaagctttctcaagaacatgaggaagaaagaggcaaatacgggaaagcagtaaaagaagaaagagaaaggaaaaaactgagtatcaggaagaaaagagggagtagatgaggaaagaaagatcaaggaagtaagagtaatatattgattaatgtgaatgaaagcaggaaagtatttgaagaagagagtgtaaagcgcgtaccttttgcataatgtccc

SEQ ID NO: 735 - DNA, 167 bp, Cyanidium caldarium
  Clone ID: LIB190-015-Q1-E1-A6
aacagcactaactgtgacattgcagtaaactaccattatgattgggtcagggatatttcttgactatataggtggagggaggagagagatccatcaattacatcatgtgtggtaagatattacagaccagtgccccccgataaggaatctaactgagtaaagaaaat

SEQ ID NO: 736 - DNA, 344 bp, Cyanidium caldarium
  Clone ID: LIB190-015-Q1-E1-A7
cgtccacacgctttttgaattgcatgttttttgagatcaccccaacacttgtacactaaatgaacgacgtatgggtactaactgtgcattttgtatagatatcaaggaggtcaaatgggttatcaactacgatttcccggggactagagaggactatgttcatcgcattggtcgcactggtcgtgctggtgcccttggaaagtcccatacgtttttcactccggataaattccgtgttgcgaaagacttagttaacttgttgcgacatgctggacaggacattcctcccgagttggctccttttatttttttttcgtcctttggcggtaacaacacaaactttt

SEQ ID NO: 737 - DNA, 353 bp, Cyanidium caldarium
  Clone ID: LIB190-015-Q1-E1-A8
tgaccacggtatttaccaaacaaactcgaacagttttggggccaggctccaccaagttgatttatcgaagtgccgcggtactcttggcaagtggccaagcacttccagaacacggtttgaagccacttccccccaccaccagttacccacatcgaaaacaacccccgaggcgaccccccccccctcctccacacgcactcacctcaccaaaaaaaaaagccacacctccctttttttttttctacccccgcgacccccaccacccctctcccctcgccccaattccccactcccccacttcccgactctcacccccgcacccacctccccctttaccccacgccccccccccc

SEQ ID NO: 738 - DNA, 411 bp, Cyanidium caldarium
  Clone ID: LIB190-015-Q1-E1-A9
cacgcgtccacgcaatcgttccacgaacgagagggtttctaaatgactttgcgcaccttgcagttttctttggacttgtcgttggtgcgcttttttttgtggcactgtcgacgctgagttgtttctagaaagaacacaaggccttgtttaggggaactgactatttaccttcgaagcactttacaaggacaatggagactacaaacaggtcaggtgcaggagactttacttacagggaggctccccctcaatggcgccatgactctttcagctcaaggggtggttcctattcgctcgataatcatagctggtttctttctaacagctttcactcatattcacgagcaagcacggaaccggctgcctatcgaagcgtggccggagtttccgctaacgctaactttccttcct

SEQ ID NO: 739 - DNA, 231 bp, Cyanidium caldarium
  Clone ID: LIB190-015-Q1-E1-B10
agcaaactgccctctattagggcagtgcgaaagattaccgtttggggcatttttaggcacttttcatttcctccacgatgaacgaaaaatttgaatatattcttatatggcggtaggagagtggcatggaaaatttttgaaggggggctacaaggtattaacaggaagaaaccttccaacttccaaaggcttaaattgcttttcccaaactgaaaacccccccttaaaatg

SEQ ID NO: 740 - DNA, 243 bp, Cyanidium caldarium
  Clone ID: LIB190-015-Q1-E1-B12
aggacaagagaacatgcacttctggcttataccatgaaagtccgtcaactaatcgtcgctgtgaacaaaatggatgacaagaacgtgaactggtcaaaggaccgttatgatgaggtttccaaagaaatggacctttacttgagagggggtcggatataatccaccaaaggttccaaagatcactgtatctggatggactggaaataacctttttgagaaattccctgccaattatccccttgg

SEQ ID NO: 741 - DNA, 404 bp, Cyanidium caldarium
  Clone ID: LIB190-015-Q1-E1-B3
cccagtcgtccaatggagttagtgcagagtaagcagacagcgatatgttaggattcacaggtctgggtttaaaaaatgagaaggatattactatcaaaggtttggaagcagtgaaaaatgcaggtttgggggttctggaaagctatacttccgtgcttggaggtagtagacagtccttgagtgtattttatggaaaagaagttatggcaaaaacacgtgccagcagcagcggtaaaacgtgtgtagcaagcgtagagcacaagaactgggtgtaaaggtcgagtagtacagtaagtgtaaaagggaaaggaaaggattatatttatattatggatgaaatgcagagatctctagacaaaggcaagaaagaaaagaaaagaagacacactaaatgaggcgagaaa

SEQ ID NO: 742 - DNA, 198 bp, Cyanidium caldarium
  Clone ID: LIB190-015-Q1-E1-B4
acgcaaccgggaaatattgttggaactggaaatctggaatcccgctgaagactcctaaacactcaaatcagtcaaggaacccaagcatgagcccaacaacatgtatgcggattgggttctatggactgctttattcagggcttctgcgatggttaattttattgcattataaacggatccaacatgacgtattcttac

SEQ ID NO: 743 - DNA, 316 bp, Cyanidium caldarium
  Clone ID: LIB190-015-Q1-E1-B5
gtccagaaaagcgtgtatagtaaagagtattaatggtaacccaaagcataagaaaaataaagcttggcagccaccaaaccctgcagaactcggcaactggattcataggggaaatggacacgttgtgcacgtatggtagggagaaagggagataataaacctctttcaaaggggaactggctttccaagaaagaagccagtaattttggaaaaaaaaacactaataaaacccacaaaaaaggaaaccccccaacaaaaacaaaaatctaaataccacactaagaaaaacccacccacgactccttttttttttttt

SEQ ID NO: 744 - DNA, 307 bp, Cyanidium caldarium
  unsure at all n locations
  Clone ID: LIB190-015-Q1-E1-B6
cacgcgtccgaacagttgacaactnctttatcgatgtaaataatggagttcttgttccaccaccaccaacttccgccacaagtgctcttggtgctgggacttctgctcccgtcactacaggggttccgggcagcgtaaccagtgcaccaatctctacaggaattccaagtggtgttataactccacgaattccaactggtgttataaatacaagtgttccgactagtccccctcgtgttcccaatggagcttctattataaaaaaacaagctgcctacatccgtatatttttttatctcaaatctcc

SEQ ID NO: 745 - DNA, 420 bp, Cyanidium caldarium
  Clone ID: LIB190-015-Q1-E1-B7
cgtccacaacctaattcagctcatcctccacttcgtcaagcaccaactgctgctgtcacaatttttagatagccgcagaagactcttccatcctcgaattgctaccagtcgcctcgggggtctctaaaagacgctgctggtgatcgggggtaatacaagcttgagtgatgggctccaaatctccttgcaaaaagctgtctaaagagaaattcatacccaaacgatggtctgtcacacgtgcgtccttatagttgtaggtacgaatcttttctgcacgggcacctgaaccaacctgactactcctcattcttgtattggcttcctgttgttcctttaaacgcatttcatacaatttggcaccaagaatttgaaaagcacgttccctattctgtaactgggacctctcttctgtgcaaaata

SEQ ID NO: 746 - DNA, 298 bp, Cyanidium caldarium
  Clone ID: LIB190-015-Q1-E1-B8
acctggacccttatgacctgcctaccccccactttgatcttggcatctggcaatattccattcttttttttcgagatccggtgcaactattcaaaaatcttcgcaactccttggttcctaacactggaaccccccccacacttacacgggcacccctaaaacaatatcaggtgcttccccccccccccacgtttcctgcacacccccacaaaaaaaaaaaccctcaccatcattttttttttttttatccaccctcaccaccccccatccaccacgacacaccacccattccctcccc

SEQ ID NO: 747 - DNA, 115 bp, Cyanidium caldarium
  Clone ID: LIB190-015-Q1-E1-C10
cacgcgtccaagaattaatttcaacttttggttattgctgctaaaaaatttcgtcttgaaactactttttctaacaacaatccaatccaaattaagggccatttaaaggttttcc

SEQ ID NO: 748 - DNA, 109 bp, Cyanidium caldarium
  Clone ID: LIB190-015-Q1-E1-C11
cccactcgtccaaggacaactttaaccacatttaccaatgtgataaaaacttatccttcataacacaatataaacaacaaaaaaataaaatcaacataaccacacaatt

SEQ ID NO: 749 - DNA, 368 bp, Cyanidium caldarium
  Clone ID: LIB190-015-Q1-E1-C12
aaggacacgtgggctttgtgcttggacaatggtagcaaagactgctctgagttgcctctttctctctttccttatcgctgccgcagttgcagccgacgtagtttcagaggagagatggggatatgctcagcaaacccaacaagaggagcagtgccaacaagtatgtaaacagtatgcatactatcatagtccagtctgcacttccgtaaccacacagagcccatactggacccaatgctcgaagactgtgcaaatctttgtcccaagccagtgcattacttatacccaatctcctacatggaccttttttttttatttacacaccactagcgtaacatcccaatgcatcaaggccgttactacctata

SEQ ID NO: 750 - DNA, 238 bp, Cyanidium caldarium
  Clone ID: LIB190-015-Q1-E1-C4
gtagttcatcaaagatgagacaccacttcaatatggtgtaagtgcttctctttggactgttcgtctcttcctctacacagttattttaggattctcggccactatcattggcttttatgggggtaaaggagacaacatatggaacgacagcttattctatgatgggaagtacattaacttttgtgcttattctgcctcttctgttgtataacgacgggatcactgaccctgtaaatat

SEQ ID NO: 751 - DNA, 391 bp, Cyanidium caldarium
  Clone ID: LIB190-015-Q1-E1-C5
cgtccacccacgcgttcgcccacgcgtccgagcacagtaaacacagaaggggacaaaaaaactaagtttgctgtcagaaaggtctattcaggcaactagtgcgcgaaacggttttctcgagacccctaaatgaaggacaatcgggtccggggtcatcttccaaaaataccccacaaagttcttcttccgagaaagttcctacttggaaggaagtgatggattccacggcaaccacattgtttgcaacggaaatgattcgaggacttatgatgacccttcagtatttcttccaaccagcggtaaccctcatttttcttagtgaaaaaggacctctttctcctcgttttacaggggaacatgctcttacaacatatccatcccgacaggaacc

SEQ ID NO: 752 - DNA, 362 bp, Cyanidium caldarium
  unsure at all n locations
  Clone ID: LIB190-015-Q1-E1-C6
cacgcgnctgaaggcggcgtcaaaatagagagcccacccgagtagaagaaaaaagagagaagaaagaaaagaagagaaaagccgtactgaagaccgacacaggtactcggggagaaaggagacccattttaaggggagagagtggacgataaggaactaggcaaaaggatatggtatctgcggtagaacatatcacacaagcagcaccgactgtttagcaaaaacacagcactctgcagaccccacaccatgtaaagtatacagtgtgcggcctacaaaatactacagaacaaatcgatgatttttatttccagtaccagatgacgtatagagaatggccgtcctaactgtaaggatccaaa

SEQ ID NO: 753 - DNA, 287 bp, Cyanidium caldarium
  Clone ID: LIB190-015-Q1-E1-C8
tgacaaaaatagagatcaacttttttttaaaaaaaaagaaatgactggagataagtcatctcaggaccaggcgaacgatattggggcccaggcacgggaccgtattatttatgggggaactgggatgaacgaaagtgctcaaaatgcacgggacgccgtcaaggacaagatgtcccccccgaacgagtccgtttccaccaaaaaaaaaagtctgaaggacgccccccccacctagatactccgaggtcatctcaaaaataacatcctgtccgcgtttattttttttt

SEQ ID NO: 754 - DNA, 60 bp, Cyanidium caldarium
  Clone ID: LIB190-015-Q1-E1-D10
gtggggcagatgatacacatcgacaaacaaaaacactttcttctctcacacgaagacatt

SEQ ID NO: 755 - DNA, 353 bp, Cyanidium caldarium
  Clone ID: LIB190-015-Q1-E1-D11
acaagactaggaaagaggcattggcagcttatttagaaagcaaaaaaaaggaaacgagtgaagtggaacaagaagttgcacaattaaagtcttataatgactctgctctcaagtcaagtcggggggctttggatacagcttatagtgaatacggggagagtcacaggcagttgtatcaagaaaaggaacaaatgaacgactctcttttacaaagtattgaactgccaactatgttcaacatggaaattccttaaaaaattaccttttaaaacaacaaaatttggaaaagtcctttaatttgtttggcccctaatctttttttttttttaataaaaccaaatttgtaagttttt

SEQ ID NO: 756 - DNA, 89 bp, Cyanidium caldarium
  unsure at all n locations
  Clone ID: LIB190-015-Q1-E1-D2
tgnaacctcttcaattcttcttgcttcaaaaggagggtcgcaggttttttaangtnnatgctggtnnnnnntttggttctgttcntctt

SEQ ID NO: 757 - DNA, 387 bp, Cyanidium caldarium
  unsure at all n locations
  Clone ID: LIB190-015-Q1-E1-D3
agtgtattcctaaaaagggaatccgngagaatatgtgtacaccttggctagactttttagtgaacaatatgtacgaagaccttcgagctttggccagggggcaagcggaagatcttcaaaggggacagggtgtgcgcagtcctgtgagtacagccaactcaaatacgaattctcagacgactccagctgcatcgaatgatcagaatgacaaccgttctcaagcttggcacacgcagaacagtgtacaaactttggacgctgaacaagttgccaaacaaacgaaaatacttcttttctattggttgccacgaggtgaacttgcacgtcgcattcagccaactaccgatgcacaacgtgctttccgtatcccgattattctttcctcca

SEQ ID NO: 758 - DNA, 425 bp, Cyanidium caldarium
  Clone ID: LIB190-015-Q1-E1-D5
cgtccaaccacgcgtccgcaagaaggtgttacacggggatccccagaacgtgctgtgaaatgagagaacgtacgagaaagccaagtgaggaaaagaaggcaagtacagggcggcccgggaaaggagagggcgtaagacgtgagacacagggggaagaaaagagaagagagctagaaaggaggtaaaagaagagtaaaaggactagaagaggtacggaattcacgaggaaggagcgtgaaggaaggaggaatcccaagtaatcgaggaagaaaaagcttcggtgaaagcgtgaacggattttgtacacactgctctctcaagttctggaagtgtgctaggaataagcaggagaagtataagagagtaggaaaagaagaaaggaagtgaacacgtaagacgtgaaaaaaaaaacaaaagggcggccg

SEQ ID NO: 759 - DNA, 408 bp, Cyanidium caldarium
  Clone ID: LIB190-015-Q1-E1-D7
gtccagaaaactctggttggttcgtcatggtgagagaacgcaccacgtggaccaagaatggaaacaaacagcaaagaacccttacgatcctcctctcacggaaagaggcgaccagggggcgagagagttggcatgagagggagcaggggaacgagtagaggttatcatttcctctcctttccttcgatgtgttcaaacagcgagcgttattgcatccaagtgcaagcttgacatcaagattgaaccacgtgctacagagtggctaaatgaagagtggtttggtcccactattcctgagtggaagacttttttttttctgcacgcacagtttccttccgtagatgttagctatcaaccaatctccgtagcaaaaacactcagaaacgcgttgttctttgacggaaagag

SEQ ID NO: 760 - DNA, 388 bp, Cyanidium caldarium
  Clone ID: LIB190-015-Q1-E1-D9
ccacgcgtccacccacgcgtccgaacgctacatcagggaagaaacaaacatcagctatggagagtaaacgaggtcctcttcgttccaaagctgccaataatgttaaaaacgtagaacaaaagaggggcgtccatacagaagagagagataacggagtcgcaaaggcagagatggaaaagctttctcaagaacatgaggaagaaagaggcaaatacgggaaagcagtataagaagaaagagaaaggaaaaaactgagtatcaggaagaaaagagggagtacatgaggaaagaaagatcaaggaagtaagagtaagataatgatttttgtgaatgaaagcacgaaagtatttgaacaagagagtgtaaagcgcgtaccttttgcataatg

SEQ ID NO: 761 - DNA, 300 bp, Cyanidium caldarium
  Clone ID: LIB190-015-Q1-E1-E10
cgcgtccagttatagggtccagctcatattaacatactcaaaaaaaaaacttctgttgctgaaacttttcttggtatacatttgggctcctcttgcatcggtttagccattgcacaaggtggggagtacggtaacttttccgtattcatgggggggaagactctcccctttgtctttttgggtaactcctcatactttcccagcgctaacgccaaaattgccctaacgttccactgtttgtaaaacgttttcatgaaaaccgtaccttttttaacacacaaattcatagctgcttaatct

SEQ ID NO: 762 - DNA, 52 bp, Cyanidium caldarium
  Clone ID: LIB190-015-Q1-E1-E11
aaccacacttccacgaaatctattttcgtaacctaaacacaatttcatatcg

SEQ ID NO: 763 - DNA, 309 bp, Cyanidium caldarium
  unsure at all n locations
  Clone ID: LIB190-015-Q1-E1-E6
ataaaaatggtaggtggagtagtagtgantcatatgaaagaaggaatggagattggaangagggattacatgaaggatgttatagggggataggggataaggtggatatatatatcgataataagtgtgatagtaatataaaggaccccaaagagaggaaagaggtgtatgatacaagcaaagaggtgacgcactccatcacagagtaacacatgcaagtaggtaaagcgaacgggtgagtaaagatgtgtattttatttaacaacatgaaagcacagaataatgtatgacatggttatagtaaaaacc

SEQ ID NO: 764 - DNA, 435 bp, Cyanidium caldarium
  Clone ID: LIB190-015-Q1-E1-E7
gtccatgcgtttcttgagctggtttggtttggtgaggagcctagttcgcttttcgaaaaatgaggtgaagaaggcgaggttacaagttgagcagcagaatcttgaaaggcacatggggcagttggattggggaaagccgcgtgaagggcgtccagagatgacctgggaagatattgaagcacaagtagagaagggtttatatcttgttgttatcgatggactggtatataacgtgaccgattttcttccgagtcaccctggtggtagaaagatattggagttctggaacggtcgcgatgctatccgtttctttattggagaagtttatcgtcatagcaaggctgcaacgaatttgatcgcacatattcgttatgcaaagttggttgagaaacttcaatactgtattggtttgtggttaaccagggcattgtttgc

SEQ ID NO: 765 - DNA, 381 bp, Cyanidium caldarium
  Clone ID: LIB190-015-Q1-E1-E8
gtacttggtgcggtctatgtgcacttgccgagatcattgcattgataatcaataaagttattccggtatttaatgaccttcttggtttagtagcttcattgggtgcggtgacaatttacttactgtttgtcgggggacttgtggttatttgataattatgggaagtggcgtatacatcccatcttgacagttcccaccttacttgtgtttggacttggaaaaactattcttggtcttcccccctatgcttcagtgaagagcatcatagtttacataaaaactggtcaagcatgtattttttttttctgctcttacaacacccaacctggagcacaatttttcgtcacaagtgttgtgggaaaataaactttgtctgccttt

SEQ ID NO: 766 - DNA, 385 bp, Cyanidium caldarium
  Clone ID: LIB190-015-Q1-E1-E9
ccacgcgtccacggacgcgtgggcaattggacgtttggaaaaggatacagaacggatagagtccgcacttgaaagagctaaactttcggcaatggaagaaaaggaagagttcaatggtgctccgacgaaagcagtgcctacgcagaatagctcagggggtagtgctccgcctccaccaggacctcctcctccaaccttggcaaaaacaaactccgattacgaaccctcggaatcttcagcacattccgcgttgtttgcagccatcaactcagcacgaaccgacatcaccaacaatttgaaaaaagtgaccaaggcatatttttttttttgttacacgtcacaggaatccaaagactcactgccttccaaaaccccagccaactca

SEQ ID NO: 767 - DNA, 343 bp, Cyanidium caldarium
  Clone ID: LIB190-015-Q1-E1-F11
aaggacgcgtgggctggcaacatgctggaatgtatcaaatggtaatttgctactttttatggagccgtaattggtaacgaattggaaatatcaagagaggttgtttcattcggggggagtgtagctctaatatggacttgaagggagagatgagttttcgtttttccgcctggttctcgactcctgttggtacgacaacttgagtagctttctctccttttgtcaaagcaatcttcttgttcttcttgcgtccagtcttttgttcgcaattagcctgcttgatttgttttttaaaaagttacatttttttttatccgcccccaactgttgtgttcccttgaac

SEQ ID NO: 768 - DNA, 375 bp, Cyanidium caldarium
  unsure at all n locations
  Clone ID: LIB190-015-Q1-E1-F12
acgaacgcgtgggatagcgtgatatccatggtcactaacatagcaacttgtcattccgtgacgatagaatactaccccgatatgttaaaggttatgattcccttgttcaaaagtggtacatcagacttggaggcttggtatcgtgtgacctacgagaagaacagcaacaacaactagtatgctttgtgattcaacgacacaaaacaccatggaaaccaccggaagaaaagggaacctcttgggatttgccttatgaccgatgtctactaggcgcacaggaaattgcgatcgaattggatccctattttttattttgcnttgagggtgcgtgttccccatcatgtgatgaggactactaacaatcgtaccactgct

SEQ ID NO: 769 - DNA, 261 bp, Cyanidium caldarium
  Clone ID: LIB190-015-Q1-E1-F3
actttctaaaaaacaaacggagcaattaattcctagaataggttatataagaaagtaccaacatctacttgctgaatactttaatctgtgggcaataggtgttggtaaagatccatttcgaggattacgtatttatcctacatatttagtacagtttttgatactaatattaatttatattaaatttcaattaatattagtgaatataatcatatcatgatattaacaccccgaaaatgaattatcaataaaactttaaca

SEQ ID NO: 770 - DNA, 412 bp, Cyanidium caldarium
  Clone ID: LIB190-015-Q1-E1-F5
cgtccaagtcagactttgacaataaccagcaaaacttggatccaactagtagcgtgttaaatactggaaatgacccattttctactagcgaggaaagcgagtcacctaggttggacgtgggtcacttggacagaattaagcgtttgaggagtgcacctgcgttgggtgtctatgctcctggttatggaaactcgccagaatatttgtttgcggaagactataccgactatcgtaaaaagtcttggggagaacagctcatgtattggacaggagtttcttatttgactggtgcagtgactggtggttcgttttttctcctataacgacttcgttcttcacgtggcaaaagttggaaactacgagttaatgccactttgaatgccaatggtccaacaggagctgcattagctaa

SEQ ID NO: 771 - DNA, 251 bp, Cyanidium caldarium
  unsure at all n locations
  Clone ID: LIB190-015-Q1-E1-F6
gacagagggcatggcaggggtgtcacgtgcaaagcttcctctggggacaggggtgaggttgacgaatttttaacgggcanagggttgtaccgctagtcctttgagtgacgacaacttgttcgtttggggtgccaccccttttggcccccctgatactgcctaaagaacgaggtaggtacccccccccaccaacttttagtgaacagtatcctgaaaaaacacccagggtccgtcttacttgtttttttttc

SEQ ID NO: 772 - DNA, 376 bp, Cyanidium caldarium
  Clone ID: LIB190-015-Q1-E1-F7
gtccagaagcaattttcaacggccaacgtatggatgcaacacttcctaccatcaaataaatattagaaaaaggagcaaaaagcatcgtacttctttcccatttgggtcgaccacagggaaaagtggacaaaaagtattcgggaaaacgggtaccggaatatttacaacagcggttgggtcgaccggtcgtctttctggaacactgtgtggggcctcaagtagagcaagcttgtaaagacccggcgcctggatctatctttctatgtgaaaacttacgtttccatgtacaagaagaaggaaaaggagttttttttattggaaacaagatcacaggaacacccgaacaaatagaaacattccgagaaagtcttaccaa

SEQ ID NO: 773 - DNA, 225 bp, Cyanidium caldarium
  Clone ID: LIB190-015-Q1-E1-F8
aggaacacacagtaaatgaggcgagaaagcatacgaagtgattgtggattaggagcccgtgtactctatttattaggggaaagggggactaacaaaaaagggactcattccaccaccggagtaaacgcgcaagacccccccccaaagcacttcacgcgaatcaaaaaaacggatcccatgcacccctccctacagaaacgcacgcaccaccctaaacgaaaacac

SEQ ID NO: 774 - DNA, 97 bp, Cyanidium caldarium
  Clone ID: LIB190-015-Q1-E1-G10
agtttcaaactgtgttgttataacaaagacattttgccttgtatttgatacgacttttaagttttcaaaaattccttatccaaggtcttctaccgac

SEQ ID NO: 775 - DNA, 236 bp, Cyanidium caldarium
  Clone ID: LIB190-015-Q1-E1-G11
aaatatccctagctaggaaccatggttttcgttaagaggtgttaaaatatgctcgttcttttgttccttatagaactttccaaggaagcagtgaagctactaaatctaaaaggcgtgtgacaaaccaactttctggcctttcggcgggaaagcattcccaaagtgcgtctgacgctcatgaacacgttgacatctgcaactttgaagcaccaaaccgaccacaatggggcagtccc

SEQ ID NO: 776 - DNA, 267 bp, Cyanidium caldarium
  Clone ID: LIB190-015-Q1-E1-G12
cgcgtccagaaagaggcaaatacgggaaagcagtaacagaaaaaagagaaaggaacaaactgagtatcaggaacaaaagagggagtacatgaggaacgaaagatcaaggaagtaacagtgggagagggactaatgtgaatgacagcaggagggggggtgaacaacacagtgtaaagcgcgtaccttttgcaaaatgtcccacccagtgacacaggaagcacaaacaaaccacaacaagtagccacgtaagacccgaagccacttgat

SEQ ID NO: 777 - DNA, 311 bp, Cyanidium caldarium
  unsure at all n locations
  Clone ID: LIB190-015-Q1-E1-G3
aaatgacaaatacncttctcaacttttctagacaggagcaacccgttactggagtttaacaagggacaacgactttctagtagtgttgctttacaattttggaagccggagtgcgggtcaaaccagttttgttctttaggcgctctggggtcgaatgaacaagacatttctagtacgaacaccgacatgagagtatgtattgaaagaggatatttactggagttgatgggtgagggattgtctgtttgtatgccttgggttatctcggaatatattcactacttggaggagactctacagtcttatttttt

SEQ ID NO: 778 - DNA, 422 bp, Cyanidium caldarium
  Clone ID: LIB190-015-Q1-E1-G7
gtccaaccacgcgtctgggagaagatatatgatcgcaatccctttgtttaggaacaaaagaatacctagagacagacacaaaactattacctacaggcagaattctgggggccgagtctaaatcgtatttggactttagggaataagggctcctaaagggacctcctaaagaatagtctggaataacaaatggctatgatcacttttttgtgttcgataagactggaccgaaatcgtcattacaatggatgactacagttcctcatgcggagtctaaaacaactttgaaactctatacctattattttttttttataattttacacccgcacgtttcctcaagcctcaactatgtttccctatcatcacttccaacggttctgttttaaaccaacttgctttatccacccacttcaccatcc

SEQ ID NO: 779 - DNA, 328 bp, Cyanidium caldarium
  unsure at all n locations
  Clone ID: LIB190-015-Q1-E1-G8
cgtgttgtcgactatgctgttnccgttcgcgttctgtgggccgggtccggtttntctcttttttctggggccctgtcnctgcccccgttttgtgccctcgctgtggccgcggcggtgcgtttccccccctccccggttgcctcccgcgttgttgttgctactgtgggaccttccccctcttctgcgccccttcgtgctgcgttagcaaaaagtgctgaccgaggcatacattttttttttgaacaggagttgcccccatccgtcgtttcaagacctttaaaggggattgtactaaaggacaaaccaagtctactaatattaggaaaac

SEQ ID NO: 780 - DNA, 303 bp, Cyanidium caldarium
  Clone ID: LIB190-015-Q1-E1-G9
aaaaaaaacagcctacattgttgccgttgctcgaacaactataggatcgtatggtggagctctgaaagactatacagcaccgcaacttggaggaatagccattcgaagagcagttgaagtatctaaaatagacaagagtaagaggggggaaatatatttcggtaatgtgttatccgctggtgttggacaggcgcctgcgaaacaagcttgtatggcggcaggtttagcggatactattccttgtactacagtaaacaaggtgtgctcttcaggtttaaagtcgacggtgtttggtgttcaatc

SEQ ID NO: 781 - DNA, 270 bp, Cyanidium caldarium
  Clone ID: LIB190-015-Q1-E1-H10
cgcgtccaaccaagcgtccgcccactcgtccgggacaacaaataaaaatgttggccttcgtgtatggacaaggccgttgtatactacaacaacatcaacaacactctttacaaacaagagggtgtttcctacgaaaccaaaactattttgtggggaagaataatgctactgggaaaaacacaaaaacagtacttttcaaaagacgaaaacacgtattaactgtacacaccactcatgtcgacagtctacgttgcacaatggaacacaaaa

SEQ ID NO: 782 - DNA, 353 bp, Cyanidium caldarium
  Clone ID: LIB190-015-Q1-E1-H11
aaccacacgtccgcgccaatttgtctagagagtgattatatgtgtgttggttggtttctcgtattttcgtgctaggaaaaagatgcaagtaccgagatatcaaggtccagcaggggatgtattgaaacgagatacttcataaggggggggggaagaggctcgaatgtcttccttcattggggctttatcactctgtgacttggtgaaaacaactctgggtccaaagggaatggacaaaatacttcagtctgcaagcggtgatatcattgtgactaatgacggagcaaccattttgaaatcagtgaatattgtttatgctgctgcaaagattctagtacatatatcaaagaccc

SEQ ID NO: 783 - DNA, 100 bp, Cyanidium caldarium
  Clone ID: LIB190-015-Q1-E1-H3
acgcgaccgcccacttgtccgcccacgcgataaacgggaaccccggtttctaccgttatgctcttaccttcgcgactcgtccattcttttgtgtttgttt

SEQ ID NO: 784 - DNA, 381 bp, Cyanidium caldarium
  Clone ID: LIB190-015-Q1-E1-H4
tgcaaaagttgtggtcgttgttatgtagaaatgttgactacccatacaacaagaaaaatattcaaacattttacagtgctgcatataatgcttctccttatagagagctttttggagaaagaaaggaaccttttgggggagatcggaatgaacgcatacaaaatatatgggaaaaccttcctcctgcaacaatggaaagttacttgaacacgtcttggtcttgtaagaaaagtgaacaaacccaaaacaagttagatctggcaacagagaatatattggatgaagaaggaaatcctctcgtgtttcatatgtacgtgaccgtttacaaccaacttaccgacatacttacagacaacggtatatactgtgttgaaacccccg

SEQ ID NO: 785 - DNA, 356 bp, Cyanidium caldarium
  Clone ID: LIB190-015-Q1-E1-H5
cgtccacaaaattcttcataatgtttgcaaatggaaggaagctcgttttaatttagaaaaaaactgacaacttctccccagccgtcagtttacggcttgtacagcgaggggaatagggtggtctttcgtacaatcgctcagttttaaggcatgtttgaggtctgctcttatatgtgcctttcgatgtgcacttttcactcttgctctggttgaccagcgtattgatatcaatccaggaggcaatacgcaagcgttttgtcattgttttgaaagttgtcattaagtaccgaatcgtgataatgattccattttgtatgcgtacattcaaacccttgttatttttacagaggattaca

SEQ ID NO: 786 - DNA, 140 bp, Cyanidium caldarium
  Clone ID: LIB190-015-Q1-E1-H6
caacacagtgtcaagcgcgtaccttctgcagaacgccccccccactcaaacaggaaccccacccaaacaaacccacgtagccccccccccccccaacctacttgatcccacgctgtccaacccaactacggccgacccac

SEQ ID NO: 787 - DNA, 163 bp, Cyanidium caldarium
  Clone ID: LIB190-015-Q1-E1-H8
gtccacacaatctttgagacctcagcgaatcactcgacacccaagtcgatcgacaaaaactctcattggagcacttccatataataggaagatactctgcagacttcagttcagggtgcaacacacagaatttctcaggggttcggggacgtccaagaaaccg

SEQ ID NO: 788 - DNA, 441 bp, Cyanidium caldarium
  Clone ID: LIB190-016-Q1-E1-A11
acccacgcatccacccacgcgtccgtcacgaatgtaaaccaagaaaaagttgtttgaaaagaacaaggacatataggtattttgtggaaaagtccgtcgggggagttgacagaaatattcgtggggaagagaaaccaaacaaagaagaccaggaggtgcaaccccttgaacctttatttcagtatgagctcgaaaaggaaggcgcttgcactggaaatttcatggtgtttagcaatgacaacttgtctttttgttgttttgacccaaaagaagactcggaatgttgtgacaaggattgtttggactccaagaccattattatccctatgggctgctctctgtcaggcgaggtattcttgccgtttcgttccacatttgtttcctatagatgtccgccttcacaagtaccttgtctcacttgtgctcgaaacgcgccgctat

SEQ ID NO: 789 - DNA, 229 bp, Cyanidium caldarium
  Clone ID: LIB190-016-Q1-E1-A2
aggcctccaaccacgcgtacgcccattcgtccgaggaacaaaactgacgtaaacgctgtggaagccttacattgggctaacatgtgcttgtactccttcaatatcttcttggcctttttgggataaggggttcgtggaacctgtggctggggtcctagggttgcacactatcgcatgttgacctctgtgcacaaagatccaactttgtccaaaggatcggaaatgcatc

SEQ ID NO: 790 - DNA, 282 bp, Cyanidium caldarium
  Clone ID: LIB190-016-Q1-E1-A4
aggcctccacccacgcgtacgcggccgcgtggggaaagaggaaaatacggaaaagcagtaaaagaagaaagagaaaggaaaaaactgagtatcaggaagaaaagagtgagtacaggactgggggaaaggtgaacggcggaagagtaagagagggagtaaggggaatgaaagcaggaaactatttgaagaagagagtgtaaagcgcgtaccttttgcataatgtcccagcgagtgaaagaggaagcaaaaagaaggaaaaagaagtagccacgtaagacccga

SEQ ID NO: 791 - DNA, 306 bp, Cyanidium caldarium
  Clone ID: LIB190-016-Q1-E1-A6
gggccgacaaacgcgtccaatcttttctggggttctgctctaagtccaacaccttgggtggttgcttcagaaatttatccaacctatttacgtagtcacggaatgttgctatctcatgttagaaacttgacagggaggtttattactacatgggcattcggacatatgaccaatgcaatgacgaatacaggtacctttgttggtttctatggaggtcttactattctcggttggatgtatctcatgttctttatgccagacaccaaagacaagactctggaagaagtgggtgaaggatttgaaagg

SEQ ID NO: 792 - DNA, 434 bp, Cyanidium caldarium
  unsure at all n locations
  Clone ID: LIB190-016-Q1-E1-A7
cgcgtccacattgttgaataagatgagaacgaagcaagactttgagcgcttgcgtcatgtcgagattatggaagattgttggagaatcatgtttggatattcgggaacgagagaaagggaactgcttgggagacgtgcaagggaggagaggttgtacggtattgtgcattttggagaagcggaattggtgatgcaagtggaaagatgttggggaattgtttcagcgatagatgtgtgttggaagaaatatccgaacgaatgttatcgttggatgagtatgtatgtggggttgatggagatatggtggctgacgatggaagcgtgngcggaggggggggggggggaggcgttgatttgtggaagtcgtttacgagtccatgggaacgcaacgagattgattttgacgccggaaaacatattttgtggcgatgttt

SEQ ID NO: 793 - DNA, 117 bp, Cyanidium caldarium
  Clone ID: LIB190-016-Q1-E1-A9
acccactaatccaccgacgcatccgccgtctactcttccaaatcaacaaaccatccccaactctcaaaatccactacactaccattatcactgaaacaccccatcactcttcaccac

SEQ ID NO: 794 - DNA, 289 bp, Cyanidium caldarium
  unsure at all n locations
  Clone ID: LIB190-016-Q1-E1-B1
ggaatcattccaccaggggagtanngacgcangaaagaaacccaaagcaattgacgggaatcggaaaaaggggtggatcacgtaaattaatccgatgtggaccgggaacctgagctctccaggaaggtgttgcacggctgtcgggagaacgtgctgtgaagtgagagaacgtacgagaaagccaagtgaggaaaagaaggcaagtacagggcggcccgagaaaggagagggcgtaagacgtgatacagagtacgaagaaaagacaacagagctacgaanggggtaaaag

SEQ ID NO: 795 - DNA, 356 bp, Cyanidium caldarium
  Clone ID: LIB190-016-Q1-E1-B12
cccacgcaaccacccacgcgtccgcccacgcatccgtgttgataataaaaggcgtaactttgtgggtttccttacaaaatgtcttttatatttcgtggaatcaaaggcctttccaatccgggggatggacaacccgtggatttacccaccggggggaatgtataccttgaaccagatgtcgtacattgtccattttgctttttctgttgtactcattgctatgttctcccaagttaccttttatctataccgtgactttaagtgtgctttcgatgggcattgggattactccacgcatatcaaactctctgctttttttttttattctcttacctcattgctttggagatcatttc

SEQ ID NO: 796 - DNA, 99 bp, Cyanidium caldarium
  Clone ID: LIB190-016-Q1-E1-B2
acggcgaaagcacttttgttctgaaatggtcttgtcgtgaccaatcgatacaggtacaactctgagcgttttccaatgccgtttgttttccatcctctg

SEQ ID NO: 797 - DNA, 242 bp, Cyanidium caldarium
  Clone ID: LIB190-016-Q1-E1-B3
cacaaagaaggatcgtgaaggaaggaaaaatcccaaataatcgaggaagagaaaacttcggtgaaagcgtgaacggattttgtacacactgcccgtcagcttcggggactgtgggacgagggggcaggagaactaggggacagggggccgggtggagtagcgaaccaggagaagggaagtcaaaggtaggaaagaggaaaggtttacgagagaaggaagtagacagaagagactgtaaggcg

SEQ ID NO: 798 - DNA, 292 bp, Cyanidium caldarium
  Clone ID: LIB190-016-Q1-E1-B5
cgtccattggaatattatttacatatcctttgcaattaatacccattgttcaggcagcagaagactggttagcaggaagaacgataacgagttctcatggtgaaccgagggaaggggttcaaggggaatgagaagaagaggaagaggggttttctacggatgatcaaagttccgagtcggaactttatgactcagcagtggaagaagcagcaccaaaagaattggatattggagaaaactactatcaaagagacgatttataagaaggctcagagtatgaccaggaaacttc

SEQ ID NO: 799 - DNA, 205 bp, Cyanidium caldarium
  Clone ID: LIB190-016-Q1-E1-B6
cgcgtccacccacgcgtccgcccactcgtccgcccacgcgacagatttagatgaaggagatacggaaagtgattctatagagagaatagagcatttcgtgattcgttcgaggaaaatggggttgacggtcggcttccatcaggatttgggagctggaatcggaccttgttgtggaaaattttttcaaactttggaatgttttgaa

SEQ ID NO: 800 - DNA, 274 bp, Cyanidium caldarium
  Clone ID: LIB190-016-Q1-E1-B7
cgcgtccacaagagacaagtgccactgtggataacaaagcagacacaggaaatgtgtcccatgagctccaagttcttcgaaaacaacaacaagatgctgattgtgggtagcgggcgttggggtttcgggattcgcatgggcaggagtatgggacgcaaggagcaactaagtccaaccttgacgggtttttgccgtgtgatatcgtccctaatggcttggtatcaggtttggccgagaaaagctaacgtttaactggaaaacggtcctgactatt

SEQ ID NO: 801 - DNA, 187 bp, Cyanidium caldarium
  Clone ID: LIB190-016-Q1-E1-B8
cgcgtcaaagcaggacatgcctttatgaatcctcccgataaaaggtttacggatgaaatgagatcgaaagtggaaatgttgcgtccttatgatgaagagagtacgcaattggcgttgggtggaatggtagcatttttccgtaaaaacggggcgtcttaaataaagtgtgtttgggtttttgtgaaaa

SEQ ID NO: 802 - DNA, 436 bp, Cyanidium caldarium
  Clone ID: LIB190-016-Q1-E1-B9
cccacgcaaccacccacgcgtccgcattttttcttccagacaaaagcaacaacaacacagtggagggacaaatattcgtagaatggaacaaatattgttggagagtcaaaacaaagtgcgtgggcaggtgaaaaagggagccttgtctatgggggggttgaaccacgtttccttttctgtacccgaaccagtgaagacgggcaagttcttttgcgagattcttggctttcgagtggttcgacgacccaacttcaattttgacggtatatggttgtacagttatggtattcaaatacaccttatcgaaggtgctgtttttttttcaccaaatatcttgaaaccaaacacagaccatatatcgttcgaagcggatgacctcacaagtatacagaacaaattggaccctttaaatattccgtatcttttggagtatcac

SEQ ID NO: 803 - DNA, 300 bp, Cyanidium caldarium
  Clone ID: LIB190-016-Q1-E1-C1
ggcctcaaaccacgcgtacgcggactcgtgggttttgcaaaaacatgaacaaaatttctctagtttcctttctattatttggagttgtcatatatgcagttgcacgacctctcaagaggctcaggagcttcggggtgagaggatagggcactcgggtatactccaacctacactagcgagtatactccaagctatagtagtgaatacactcctagctatagcagctcctatagtccagtttattcttctccttatcaatcctcatacactcctacctatagaactgattggtggattcaa

SEQ ID NO: 804 - DNA, 237 bp, Cyanidium caldarium
  Clone ID: LIB190-016-Q1-E1-C12
atattttagttatccgaacagcatttctacaaagcttctatgaactatcgatggaacagttttatgatggctttaatgagccaagaattaactattccccccaggttgtaaaatggctttatcaaattgaaaatccgggtgctttccacggatacaatggcgaatcacatgaccgtcaatccaaattcccaattatctttccctttccattttgccttgttaaaaaacttggaattt

SEQ ID NO: 805 - DNA, 268 bp, Cyanidium caldarium
  unsure at all n locations
  Clone ID: LIB190-016-Q1-E1-C3
acgcgaccgggaaatgcanaaggttgtaaatatctttatgtcgatcagcaaggccggtgtactggaagcataagccgacaagatgttgcagattgttgtttcaccgggctcttggggaaaaatggcaggagaacagcgtgtcaaggggttgaaaatcctagtggagcttcccaatcgatagattatattggtttgttttcctcgttggttgtcgataaagtctcgcctcgagtataaaaaaaaaaaaaaaacagggcggcggcccttt

SEQ ID NO: 806 - DNA, 262 bp, Cyanidium caldarium
  Clone ID: LIB190-016-Q1-E1-C4
acgcgaggggaaattattattggaagataacagtttcactctcttactgacaaacggtagcaatatgttgtttctttgtgtcaagtttatatagactaaatgcaagggtcaacggggattttaggccgtgaaaaacggggtgaagggctttggagccttcagtgaagagtcctgtagtggactgaggaaaagttaccactgtttaccagaggttttgtgaatcaatatctctgcgagtctacacactttttcagacaaacta

SEQ ID NO: 807 - DNA, 260 bp, Cyanidium caldarium
  Clone ID: LIB190-016-Q1-E1-C5
cgtccaaaaacttgctgtgttgggaggaggatgatgaaaaaaggcggttggtggttggttcgtgccgtaacaactgcaaccacaaaaacaaatacgtggaaaagacgggcgacgggggtttatgggagtgagtatgagaggagaaaggcaaattggaatacttttttgcgatcctattgtacttcttgggaacccaaacctttataagcctttccgttaggttctggcataccctttactaaaaacgtgtacatggatcc

SEQ ID NO: 808 - DNA, 273 bp, Cyanidium caldarium
  Clone ID: LIB190-016-Q1-E1-C8
cgcgtccacccacgcgtccgcccacgcgtccacccacgcatccgagagaactcgcatctcaggaatgtcattaaccaatatgcagtagaactatcaactgttcgtgacagggtgaagggtcgtgaggcttgtgctgatatagggaaagtgggaggaatgctcagtaaagaccgattatccatgtccactgcacagaaaggaaatgctgcagtcgacgcgtcatattgttgtgaacgtccccaggagacaaacggatggagagagttcaactca

SEQ ID NO: 809 - DNA, 288 bp, Cyanidium caldarium
  Clone ID: LIB190-016-Q1-E1-C9
acccacgcaatcaagatgtatgatgcacgcaaagaattgacgcattaaatcacagagtaacacatgcacttacgtaaacccaacggttgattaaaaaggtttaaaaaactggaaaaacatgggggcgacacacaaattcaacaattggttaaagggggggccataaaggaattaaaaccggaaacctcaaaggaggaaacccacattgcaactcaaaaaaggtccaaccaccacaattcaccattggcaaaaattgcacaattttcagcgaatctatacccactactc

SEQ ID NO: 810 - DNA, 360 bp, Cyanidium caldarium
  Clone ID: LIB190-016-Q1-E1-D10
cccacgcgaccaaaagaagaggttccaagaaccaacaagtcacgaatagccaaagttatgtatgaaaaactatcaacaagctgcaaaaaccgtggattaggaaaacactctatgatatacagggggaggcatggacagacttgctgaaagggagggggaaaagatggcaaaaatttcttaagaaaaaacaccaaaccgaacaccgacacacgaaactattgttactcattcaaaaaaccgtattagacaaaaagagcctaatccctttataaacaaaatcccaaaaaccatttgccaaaacaaccaattagaattcttttatgtttttgaaacgacaaaccaatagattctacctgcctt

SEQ ID NO: 811 - DNA, 249 bp, Cyanidium caldarium
  Clone ID: LIB190-016-Q1-E1-D11
cccacgcgaccaaaaaccggaagccaaacaagttgtttcgtattaaaaagaacagcacaaaatggagtgttggttagtaaccggtgataaacatagcactgcattttcacttacccatagggggggggaattccaatggaaaaggtgttttcgggggcattccctgggaataaatttaaatttttaaaaattttattccaaaattatcaaattccaccaggaaaggccaattctcgagtcctatttgtt

SEQ ID NO: 812 - DNA, 244 bp, Cyanidium caldarium
  Clone ID: LIB190-016-Q1-E1-D3
cctccaaccacgcgtacgcccactcgtccgtgaagacaaagtacagtgctgacgagcagtcatattctccaaatgcttggaaggacttgtatgacaaatatttgtcggaagatcgggtatttttacccaacccggatgcttcctgtgggacctaggtctttgttcaagtttccgtgcctatacatgatgattcttccggttcccatcaaggctgttcttctttgaccgaaatgttgatgtatac

SEQ ID NO: 813 - DNA, 93 bp, Cyanidium caldarium
  Clone ID: LIB190-016-Q1-E1-D5
cgcgtctatagtttcgtgggtcccgacagtgacagtccgaatagcttttcagctagcaagatactgacttctgtgctttgttcctactttact

SEQ ID NO: 814 - DNA, 274 bp, Cyanidium caldarium
  Clone ID: LIB190-016-Q1-E1-D6
gacaaacgcgtcaagttttcttcgatgggaggacatggaaggaaagacaagtatcctaagcaagtgtggcacccctttggaggcaagtttcctcatccgaggggttggaagaagcaggcgaagggatgtacccgtagtgtggcactcggtgtgaggcctattatttactatgccgagaagcatactgtctattaccagtatccttatcataagattccttggaggcccaatttgaaaacttttgatgaaaatttggaggaacgaataaaggcca

SEQ ID NO: 815 - DNA, 291 bp, Cyanidium caldarium
  unsure at all n locations
  Clone ID: LIB190-016-Q1-E1-D7
cgtccacacttatgacgatatcaaggcaacgatgaaagctgcgtcagaaagcagagctttaaagggaatattggcatataccgaagatatggtactttctatggagtgggttcaggggagtcatggttcgagatttgaggggaatgggggaattatgttgtcggaaacttttgtgaagctgattgcttggtatgataatgagtggggctactccaatcgtgttgtagatttggtgcaccatatggcgaaagttgatggtcgancttaacccggcgtgtctggttgtttttt

SEQ ID NO: 816 - DNA, 262 bp, Cyanidium caldarium
  Clone ID: LIB190-016-Q1-E1-D8
cgtcaagttgatacctaaaaagaaccgaaacgcagttaatacttttattttatcgactggagtaattgtggtgaacaaggacactcatgccaaatgacacttgcaggggtgacatggctgatcttggagttaggaagaggggtgagggggttacttcgcggggatatttcgaggaacagttcagttgggggtacctttattatactctgactgacaacggaatcgattacttacgtcaatatttgaatcttcctgtggaaat

SEQ ID NO: 817 - DNA, 312 bp, Cyanidium caldarium
  Clone ID: LIB190-016-Q1-E1-D9
acccacgcgatccacccactacgtccgcccacgctgtccgtgtacaagtaataatcgggtaatagagagcacaaatggcgtgtagcgtggaattccctacatcgcaactcacgatggtcacaccattcgggggcccgaccccttgatcaaacaaaatgagggggggattgtggatttggaaacgggaaaactgaccgattttctcaaatttgaaattggcaatttgtgtatgattaccggtggacacaacattggaagagttgggttgatccagcatacagacaaacaccctgggtccacggaaattatcca

SEQ ID NO: 818 - DNA, 266 bp, Cyanidium caldarium
  unsure at all n locations
  Clone ID: LIB190-016-Q1-E1-E1
aagtttaaaagttgatcctacgcattttatagctgttaaaatagccagcggactatcaagaactgcagtggctcctttggagcgtttgaagattgtgatgctgatgcggcgagttgctggtttcgaaagcgaanattcgggtattcggggtttttcccagtctttttcaaaaatgcttgtacgagaccgtatgcaaggtatgttccgtggaaacggtgtcaatgttgcaagaattgttcctgttactttcattcaacttgcgtctt

SEQ ID NO: 819 - DNA, 115 bp, Cyanidium caldarium
  Clone ID: LIB190-016-Q1-E1-E10
ccacgcgaccgacgtaatagtgaacgttccttgttgctttctcaaaattctttccaccatgaaatgtcacacctgcgataagtttatgtacccgcggtcggttgtgtgtacattt

SEQ ID NO: 820 - DNA, 284 bp, Cyanidium caldarium
  Clone ID: LIB190-016-Q1-E1-E11
acccacgcgaccagaagttagtaggtactcattattctgttaaaaaaactggacttactgctacaattggtatcactacaagctggatatcatattttccacaatcattcatcatgaaaatgggggttctacaacattcccactcgttataattgggggacttctcagtgtccgactgtctcttttaacaacaagacctcccagtttgccagctatacttcttactgtatatctactcttcatctataactatatattacaacttcttatcatcttccccaacc

SEQ ID NO: 821 - DNA, 331 bp, Cyanidium caldarium
  Clone ID: LIB190-016-Q1-E1-E12
cccacgcaaccaagcttttttggtttttgtgtttggtgaaattcagtattgcatatctatatacaacaaatatgcgtgagattgtacacgtacaagctggtcagtgtggaaaccaaattgggaggaagttctgggaagtaatttgtgacaagggggttctctctccagatggatattatgtacgagacacaaactctcaactagacagaataaatgtctattattctgaagcttccgataagcgctatgtacctcgtgcaattctcgtggactttgaacctgtaacaatggatgccatcaaaagtggtaaaacttttttttttttttcgtc

SEQ ID NO: 822 - DNA, 100 bp, Cyanidium caldarium
  unsure at all n locations
  Clone ID: LIB190-016-Q1-E1-E3
cctccaaaaatgtcncaggaatattagctcacctacttcaaaattcgtggtttaggcgaacctgttcgtctactatttgaagacaatggcatcaaatact

SEQ ID NO: 823 - DNA, 226 bp, Cyanidium caldarium
  unsure at all n locations
  Clone ID: LIB190-016-Q1-E1-E4
tattaaangatgttcgcaagtctttggtacaaaataacggcaagcttgttacagttatatggggacctgtagcacaatgtgatgtattttctagtcctcgcaaggtgcttggggactctcatcgtgacgatcatcgggatgatcggcatcacgaggagagccattctgcatcaacgcatgaacaggagaagcaacattccgtgcattgtcattgtggttctcctca

SEQ ID NO: 824 - DNA, 258 bp, Cyanidium caldarium
  Clone ID: LIB190-016-Q1-E1-E5
cgtcaacgccccttctggatggacggcgtggaagtagacatgggaagtttgtcttgtgcagatgtaagacctgtattacgagaggagacagaacgagacttcgatgagcgtattcgacgtgcaggacagtttctagtgcagggtcgcggtacattaccagaacacaattctgaaaggaagagtcttagggagttgcctacagcaactacagtagttccacgcgccaaacctattcccaaggagaaaccgttgacgaaa

SEQ ID NO: 825 - DNA, 207 bp, Cyanidium caldarium
  Clone ID: LIB190-016-Q1-E1-E6
cgtcaatagctccaaggtacacgacagggttgctcagatctgttccccagggagaagccaagtatttatcacagagaataggttattacttgtttggtttacaggtggggccagagggtatccctgcgatgagtatgcggataaatggacttggtggttacctcaaaacggaaaggcaaaaacggaaaaaatcccacggtaaacggt

SEQ ID NO: 826 - DNA, 267 bp, Cyanidium caldarium
  Clone ID: LIB190-016-Q1-E1-E7
cgcgtccacggacgcgtgggcaggactcctaagtgagtaacctctagttgatagagtatggaagataagggaattcggcaaattggatccgtaactgtgggacaagtgttggctctgggggttgcggggaagtctgcgtgcgcgaacaggtgtcttttctggctgttgttgtgtctaggaatggtttttcgactattcttgggatgaaacgatggccagagacactcgtcgcacgcacgaagattcatctcttttttgggggatgga

SEQ ID NO: 827 - DNA, 371 bp, Cyanidium caldarium
  Clone ID: LIB190-016-Q1-E1-E9
cccacgcgaccacccacgcgtccgagcaatcgtagagcagaaaaaatgggtgtaaaggtcgagtactagagtaagtgtaaaagggaaaggaaaggagagaaagaggaaagggatgaaatgcggggatctctacagaaaggcaagaaataaagggggggaagacacagtaaatgaggcgagaaagcatatgaagtgaaacggattaggaacccgtgtagtctatgcagtaaaagaaacaatgagtaacaaaaaagggagtcattccaccaggggagtaaaggcccaagaaagaaacccaaagcaattgacgggaatctttaataatttgtggatcacctaaattaatccgataaacccaaaaccttacctct

SEQ ID NO: 828 - DNA, 300 bp, Cyanidium caldarium
  Clone ID: LIB190-016-Q1-E1-F1
ctccagccaaagtaatggtagagcttgcacaacaacaagacgaagaacttggtgatggtacaacatcggtggtattattagcagctgagcttttgaaacgatcggatgatttcgtgggacgaggcatccatgcgcgccaacgttattgcaggatagcgtttagctatgcgagagtcttgtaaatatcttcgagatactttgtccgtatcagtagaaaacttgggaaggtcttgcttgataaacactgcaaagactgccatttcctccaaagtaattgggtcatggattccgttttttgcc

SEQ ID NO: 829 - DNA, 321 bp, Cyanidium caldarium
  Clone ID: LIB190-016-Q1-E1-F10
attcgcccgccccacccacgcaaccataaaaaaggcaaacattcgattccttggcaaaaaaaagcgagacagagacagagtggagcgttttcagaaatgattgacttgtttgttattttcaatacacgagggttggggcgtcctttatgatcacctcaatcatacaggtgttactcccgtcgaccctttaataacgtcaattcctcctgtggacacagaatgattcgtcagctcccctatcaaactatacactaaaatggacactttccaaaccacaacgttttattttttccgctcgtgtttccctaaaaactacccatc

SEQ ID NO: 830 - DNA, 103 bp, Cyanidium caldarium
  Clone ID: LIB190-016-Q1-E1-F3
aggcctccaaggacgcgtaggtgcggtacttgtgtgtgtgtatatattgatgtatgacagccatgtggttattgcgccttgcgaaaaacaaccattccgtacg

SEQ ID NO: 831 - DNA, 80 bp, Cyanidium caldarium
  Clone ID: LIB190-016-Q1-E1-F9
acccacgcaaccatatacttcatcttcttcctatgcgactccaacataatctactacctattcacccatctccaatgcta

SEQ ID NO: 832 - DNA, 278 bp, Cyanidium caldarium
  unsure at all n locations
  Clone ID: LIB190-016-Q1-E1-G1
aggcctccagaagatttagttggttactattagtggaaatcctggaacaagcaagactctgttggcattagctgctgcgttggagcagcatcgagactatagtcagatctacctttctggccctagggtactgcgggagcaatcgcgatagtggatatggtccacnaagcgttgattcgagaattgagccctacatgcaagcattgttcgacaacctgggtgtgatcaagtccttcaatagcaacaaggaggattgtaaagcgtcttctggagcgtct

SEQ ID NO: 833 - DNA, 185 bp, Cyanidium caldarium
  Clone ID: LIB190-016-Q1-E1-G3
ggtttagtcgcttcggtccttcttttgtaatactcgtatattgcacgacaaaaagtccttaagatggaaagagctttgaaaagcagtgcacgtgttgtgccgatacggccaaagggtgtcgaggcttcaagagggtctgaaacttgggcgttgcatgtagtcggtgccacatgggatggtggttg

SEQ ID NO: 834 - DNA, 269 bp, Cyanidium caldarium
  Clone ID: LIB190-016-Q1-E1-G4
agaagaatccttaatagtgaaatgtataactaagctattgaaaactggtttctcttccgtcaacgtttcaatgctattgcgggatattcatgtatagttaactggaggttgtgtgggaaaagggcggagggagtatgtggaacgcgccgacccgggaatggaaattgtgagagttttacttggcgatttcgtgaaaattcatggcgccaaaatatggcaattcaccagtcctattccactggaaacgaagcctcagttgagttttttga

SEQ ID NO: 835 - DNA, 294 bp, Cyanidium caldarium
  Clone ID: LIB190-016-Q1-E1-G5
cgtccacttatattctttgtgcttggccaatggttgcaaaaactgctctgagttgcctctttctctctttccttatcgctgccgcagttgcagcggacgtagtttcaggggagaggggggcaggggctcagcaaacccggcaacaggggcagtgccaacaagtatgtagacagtatgcatactatcagagtccagtctgcacttccgtaaccacacagagcccatactggacccaatgctcgaagactgtgcaaacctttggcccaagccagtgcactgcttggacccaatctc

SEQ ID NO: 836 - DNA, 276 bp, Cyanidium caldarium
  Clone ID: LIB190-016-Q1-E1-G6
cgcgtccggcgagaaggtggatagtcgagagggaaaaagaccagaagccaagataaggtatcaaagtaaagaaagaaggaaaaggagaagaagagaggagacgcttaggggcagcaggggagagaggaaggcttgaaagcaggaaagaggggaaatccgaaaaagaagagaaaaaggtaagaaagaggaccgaatcagggtaagaggtagaggagcaagaagagaagagagaatgctgggtggagtagcgaaacaagagaagggaagtaaaaggta

SEQ ID NO: 837 - DNA, 248 bp, Cyanidium caldarium
  Clone ID: LIB190-016-Q1-E1-G7
cgcgtccatctggagcacgttcataggagtgaatataacgttcttcccgatgcattatttgggattaggaggaatgccacgtaggataggagaatacgcggattgatatgggggatgggatatggggccaattatggatggagataggggtgttatcgaagttaaaacgggtgttggttggaattaaaagtttggaaaaaggttaaggaaattgatttaaggtggaaaggaaggattatacattgggg

SEQ ID NO: 838 - DNA, 274 bp, Cyanidium caldarium
  Clone ID: LIB190-016-Q1-E1-G8
cgcgtcaacccacgcgtccgagcaaaaagaaagaaaaagaagtagccaggtaagacccgaagctagttgatcttatgctgtccaagcgaagtaaggctagtccagtatgggtggaaagggatttggaagggattggatagggggtcaagggccaatcaaagctagtgatagctggtactcctcgaaagctatataagtagcgtatgcaggaaagaagaaggtaaaggaagagaaggaagaagcagagagggactatgagcgagaaggtggatag

SEQ ID NO: 839 - DNA, 293 bp, Cyanidium caldarium
  unsure at all n locations
  Clone ID: LIB190-016-Q1-E1-H1
ccatttaagacgagcctggatcacatttggaagaaaatattatgaaagaagccaaagaaagaaatgtaaagatacattttccagtcgattttgttgtanccggtcgtggggctcccgatgcagaggcagagatacgtaggagagaagggggtattcctgagcatatgcaaggactggattgtggaccacaaagtattcaacaatttattcaagtactgcaacattgtaatacaataatgtggaatggacctttgggtgtgtttgaaatggatatagaggcaggaggcactcgt

SEQ ID NO: 840 - DNA, 275 bp, Cyanidium caldarium
  Clone ID: LIB190-016-Q1-E1-H10
cccacgcagtcaagttgttgaggagttatcgatcgaatacaatgaaaaacgatttggacagttttttatttcgttttgttctcgaatacttacaacgaaaaggttataaacgagctgcagaggccttgaaaactgaatctaaagctgaagttggggagcactttcaaaaccctccacaatattatacacaaccactttcaaaatttcccgaaaaaatcctaaaatttcaaacacaaacacaatcctttccaggacactactcaaatttcaacccc

SEQ ID NO: 841 - DNA, 276 bp, Cyanidium caldarium
  Clone ID: LIB190-016-Q1-E1-H12
gcataattacgcatgtccgaatagaaattaccacacaaagatttgaaacgcgcctttgagttggatccttccaatgtagcattgaacaaaaacatccgcgagggtccccaacttaacgccgaacaacatgcaggggagtccacgttatttggaaatatctttgcacctttaagacacacttaagaccatattcacaacacatcaaaccactaaaccaacgccaaacaaatcactgcctcttaatgacctcaactttttttatttgcagttaccata

SEQ ID NO: 842 - DNA, 271 bp, Cyanidium caldarium
  unsure at all n locations
  Clone ID: LIB190-016-Q1-E1-H3
acgcctccagagagaancacatgtagaaattccaaacgttaattgggaagatattggtggcttacaagaggtcaaggtggaactgcaagaaaccgtacaatatcctgtanagcagtccagggaactttgaaaacgtgggtatgcagccttgaggacgtgtcttgttctacggacctccaggatgtggaaagactttacttgccaaagcaattgcgaacgaatgtcaagccaatttcatttctatcaaaggacctgaactgttgaccatgtg

SEQ ID NO: 843 - DNA, 278 bp, Cyanidium caldarium
  Clone ID: LIB190-016-Q1-E1-H5
gacaaacgcgtccaggagcaattaccaacggccaacgtgtggatgcaactcttcctaccatcaaatatatattagaaaaaggagcaaaaagcatcgtacttctgtcccattgtgggtggaccagagggaatggtggacaaaaagtattcgttaaaaggggtagcggaatatttacaacagcggttgggtcgaccggtcgtctttctggaagactgtgtggggcctcaagtagagcaagcttgtaaagacccggcgcctggatctatctttctgatgta

SEQ ID NO: 844 - DNA, 271 bp, Cyanidium caldarium
  Clone ID: LIB190-016-Q1-E1-H6
cgtcaaaacgagataaggggggcatcagtctcacttcagccgtacagaacacaaacttggatattgaaacggttaaagcaatttgtgctgaatatcgagttcacaaggcagtacgggtgtttctttagagtgttccagggtttgtggggccttgaaaggatatttccttgagagaggacgcaacagctgatgacctaatcgatgttatacaaggcaatcgaaagtatatacctgctatttacgttattaacaaggtggattgcatttctga

SEQ ID NO: 845 - DNA, 293 bp, Cyanidium caldarium
  unsure at all n locations
  Clone ID: LIB190-016-Q1-E1-H7
cgtccaggaagtatttggtatagttggcattgatggtatttatggtccgacagaagcagttattattgcggattcgagtgcacgtgctgattacgtancancggattgggtagcggaagctgaggatgatgaaatgggggttcctaggcttttgacctgcagtagagagttggcagaaagagtttccaggttacttgtgcaacaattgtccagtttatctcgcagctctactgctttacattccttacaacatcatggcggcattgtggtgagaagcgcctgggangaatgtt

SEQ ID NO: 846 - DNA, 298 bp, Cyanidium caldarium
  Clone ID: LIB190-016-Q1-E1-H8
cgtccggtgctccgcctccaccaggaccacctcctccaaccttggcaaagacaagctcggatcacgagccctcggaatcttcagcacattccgcgttggtggcagccagcaactcaggaggaacggaggtgacgaagaagttgacgggggtgacaaaggcagaaaaagggcaaggtgacacgtcacaggaatcgaaagactcactgccttcgaaagccccagccaagtcaaaagccgtttccaaagcttcgcagccgtcgggcgaaccaaaatgttagttatgggactggaagacttg

SEQ ID NO: 847 - DNA, 377 bp, Cyanidium caldarium
  unsure at all n locations
  Clone ID: LIB190-016-Q1-E1-H9
attcggcggccgacccacgcgaccaaagggattattgacatgcaaaaggaccaaagcaacacttgtagcgacggtaccccacttagttgtgcggatagaacaacgttggaaggtatttttccaagagtttgttgcggggacccaaagcaaagttccaggcgtatgtgggggcgccctttattctttcgtcactttcgtcntgtgaacgatagccacaacaccatgtcaacgctagaacacttacaggaaacgcagccttgtttgaatgaaaaactgctagaacaattttgaacaagacggccttgtaacatccgatagacaacgaacaatttttttttttgtacgcacttcacaatttcccgtcaccttggtctcac

SEQ ID NO: 848 - DNA, 427 bp, Cyanidium caldarium
  Clone ID: LIB190-017-Q1-E1-A10
gcgtccgctgagaggaggaaagccacattggaattgaaaaaaggtccaaacaagagaagtcagcagtggggaaaattgggcaatgtacagggaagtatgacccagtaatgaggagtggggtaaacagaaaaggaagtaaaaggagggaatgaacggaagttatggcaaaaacacgtgccagcagcagcggtaaaacgtgtgtagcaagcgtagagcagaagaactgggtgtaaaggtcgagtagtacagtaagtgtaaaagggaaaggaaaggagagaaagaggaaagggatgaaatgcatatatctctagagaaaggcaagaaagaaaagaaaggaagacacagtaaatgaggcgagaaagcacacgaaatttaaacgctttaagaaacccttttaatcaatgcattaaaagaaagaatgagtaag

SEQ ID NO: 849 - DNA, 344 bp, Cyanidium caldarium
  Clone ID: LIB190-017-Q1-E1-A11
gtcaaagccaaaagcagttgagcacagcaatatcaatatgtcaagtggctggaataactatagtggaacggaaggtaatgggaatgctggtgctggacaagggaagaacggggatgggaagaccagtggagaacttgcaggagataggttaaagggtttgggaatggcagccttgtcagcgggtaagctggtttatcgcggtggcaagtggtgtgtggataaggtggaaggcgccattgacgaccacaagtcaaaaggaagtaagagtggcggtggtggaaattcaggttattctcgttgattcgtaataacttggatagaaacagaacgagaccgttttttaa

SEQ ID NO: 850 - DNA, 354 bp, Cyanidium caldarium
  Clone ID: LIB190-017-Q1-E1-A12
cgtccggttctatataacgttaccgccacaggttggagacacaaaatcacacagtacacagataacaagaatttttgcttgttcagaagaaacaagcataacaaatgcgtgggtggtgggtaaaagaacgcggttgagcttagactgtgaacctttgttcttctgactgtataaagagtcttattcttcgtaactcggtccaaacctgagttttcctgtcccctaaaaataagacattctcagctgtctttgtcctttttcaaggtgaatatatgattacaccgaggagcttttacacttatttttaacgtgcggacgcaacagttttgtaattgttgtgtgtaatcccaagtt

SEQ ID NO: 851 - DNA, 384 bp, Cyanidium caldarium
  Clone ID: LIB190-017-Q1-E1-A2
acgcgtccgccatcgagtccgcccacgcgtccgcattttcctcgaatcatctaggttgcatttggagttcgcaattttcgagatagaaagcaaggcatattggaaatggctcgcgttttacgaaaggagtgacaacctcggtggttgccctgacaagtggtggatcatggaactcaccacgagaaccaacaacgacgagagctatcattctggaagaagagctgtattgcaccgaattgcccagttgtttatacgttatgtggttccctgtctacgtttatggttgacaggtagtagatatgaatatcattatttacaacagatttttttttcttttccggatgccaccacgtttcaacagtttttacagacacaatgtgggtt

SEQ ID NO: 852 - DNA, 426 bp, Cyanidium caldarium
  Clone ID: LIB190-017-Q1-E1-A3
cgtccgggaagaacaatttgcaagaggttgaacaaatgctgatggaagctcgtatgcgcatgcttacactggaaaatagtgcaggctccacattacacgcagttccagtagttcttcaagtggcgcgtcaacaggaacagaagcttctgaatcgcggggagttgcatttgaaattgtcatgggctattaccctttcattacaggctcgttccagtatattttacataaacatttcatagagcctttggaagaaacaacgaagcgtttggttgtggcaaggaaagctttgactgatgtctcactttcttgtatattagatggtttatcatttcgttctgtgcagttttttcaagaatttgggttattatctgcaaagagaaccgcacgcgttgcctggtattcggcaaattttaccagaagaacact

SEQ ID NO: 853 - DNA, 444 bp, Cyanidium caldarium
  Clone ID: LIB190-017-Q1-E1-A5
cacgcgtcagccaacgcgtccggaacgcttggccctcgttactgaaggagaagtagtttctacttttgatcatccagaattggtaaagttgggtcactgtggtttgattgaagaggccatgggaggggaagatagagttattcggttttccaggggtggtgcaaaggaagcttgtacaattgtattgcgaggtgcaaacaagcagattttagacgaggctgaacgttcgttgcacgatgcactttgtgttctttcacaaacggtaaatcattccaaagtattttacggtggtggctctgcagaaatgttgatggccaaattattttatgacttagcaaaaactattcctggaaaacaatcacttgctgtggaaggctttgctacggcattgcgtgctattccagcttgttgcagacaatgcacgttttgatgccacggaactta

SEQ ID NO: 854 - DNA, 431 bp, Cyanidium caldarium
  Clone ID: LIB190-017-Q1-E1-A7
cacgcgtcaggaaacgaataaatctagagtagaaagctgtaaaaaaaaaagagggtaagcttataagcagcaaaccacagaggaaagcgttaaagcatgaaagaaaagaaatccgaaaaagaggagagaaaggtaagaaagaggaccgaatcaggggaggaggtagaggagcaagaagagaagagagaatgctgggtggagtagcgaaacatcagaagggaagtaaaaggtaagagatgaaagaccactgcatgaagataaggaatctaactgagtaaggaaaataagcttaagctattttggctggggaagtaaagcctaattttttttatattaggcaagcaaaagcatgagagaagtataatagcataagcatgcttgaagaaaaagaaagagatttcagaaagggaagaaaagtcagctatagagaa

SEQ ID NO: 855 - DNA, 416 bp, Cyanidium caldarium
  Clone ID: LIB190-017-Q1-E1-A8
cacgcgtcagggacaacaacgatgcgcagtaatgtcgcgattgttaactttggtggacaaggataaagttgctgatataagagaacaacagaaaagaataacggacaagttgtcttccaatagggcgaaagtggaggagtgtgtgagggaactgggggggttgtatgaggaaacctgcagtgactttcaaaggacgcttggcaaaataaggcaactaaaagaagacttggagtatatggaccgcgttttgaatactttgcaccaaaagaaggaaggggatagtcaacaagagactggggaaaagtgactcgacttgcaacaatttgtctctagcttaacgttgtaagtttcatcatttgtatctttctttgtgacagttgttgttgttgttgttggtaaacactatgttttttttg

SEQ ID NO: 856 - DNA, 324 bp, Cyanidium caldarium
  Clone ID: LIB190-017-Q1-E1-B11
cgacgcgtcaacggacgagtgggcgatgaggaacaatataacaagcgcatggcattgtcgtgtcctttcctttgtttgtggaagcgatgacttcgattcttcacgacttgggaatgggctgggggaacacacccaatataccccctgcgcgggagccattgatagaactccttttccacttccttgctccaaattatacccccatctacacctggatacatacgcgcttacgatactaccgtttgacaaccacacaactgctgtcttgactgctggcgactctgcctctcacgtggtttatttttttttttcacctcttcccct

SEQ ID NO: 857 - DNA, 316 bp, Cyanidium caldarium
  Clone ID: LIB190-017-Q1-E1-B12
cgtcaagacgaaaaaggaatgtagggaattggagtgaaacgcaatacgagtggtcgatcctgaagtgttgtgcagttgggtgacacaatcggatgtaccgttggtagcgttgacgacggcaggcactttggctcgaggagtgagcgtggcaaatatttcagtggattgcaccggaggagaagaatttgttgattattcctcatttttgtttgtatggtaccatggaacaacgaatgttggaaaagaagaaaggagaggagggagaacaagagtcgattccaattcggtgcaaggtaattgatttttttttgaaaga

SEQ ID NO: 858 - DNA, 354 bp, Cyanidium caldarium
  Clone ID: LIB190-017-Q1-E1-B2
gcgtccggtagtagattgagttggtttgggattgttgtgtataagaggagttgcaaagaggaaaacatgtcaaagtttgccttgcctgcattgccttatgactacagtgccttggaaccacagggcgacactatgactatgaacgtacatcagaggggcgatcaccaaacttatgtcaacaatttgaatggtgccatacaaggggaacatgggggtcagttcaagggtctctccatcgaaaacatccagaggaatgctgcaaaggcacctgatgctatcaaggcaactgtgataaataatggcggtggtcactacaatcattttttgttttggacactcacggcacccacacga

SEQ ID NO: 859 - DNA, 312 bp, Cyanidium caldarium
  Clone ID: LIB190-017-Q1-E1-B3
gcgtccgctaccacaagatgacgagaatggcatttgtaacctacaatgacttcactgtaaaaaaaccgaaacacaataatgcgaaacatacttcacacagaaccaagattatggcttccaacggtggttctgccttcgattagccttatatacagggagtgacctttcgtccttcagaaagctactaaaacacaaattttgcacaccctttacagaaaacgtggtcaggagagttatctacaactggtgcttgggaacgtctcatatcaaccagttttcttgacgaactattggttcctccggagtcatcac

SEQ ID NO: 860 - DNA, 441 bp, Cyanidium caldarium
  Clone ID: LIB190-017-Q1-E1-B5
cacgcgtcagctatcctttggtacaatggatttgactggtgcataagatgtttctcaacttgttggagcttcaagtcgtctatttttagcaagcgctcctgtacaaaatagcaattcagaggctcgtggtttattatccgcattaccatctcggggggacgaagttgctttgtacacctcggcggctggagtcgtgtttggtttcccctatttgactccaaaacggcccgatccaaacaaagatacttggtaccagagcatcaaaaagcctgtttgtgaatcacccaattggttgtttccggcagtgtggatcccactcttttttttataaagcgttagtttgttcttgttatggaacatacaatgagaatttcctgctattcctagtgctgccattgtcgttcatctgagctttgggaacttgtggaactacctgttttt

SEQ ID NO: 861 - DNA, 454 bp, Cyanidium caldarium
  Clone ID: LIB190-017-Q1-E1-B6
cacgcgtcagccatcgcgtccgatggtcttgtacctttgcaccttaaaaatgcagcttcaaactttgaatctgaacttaaatccattctcaactatcatttacgtgaactttatcaacagacgtggggtctgaaagacaaagtttctgctgttggggggtgtcttttctcgggtcaaagtcatgggccgttatcctcagaagtgttgccagaacatataaatgcaatatgctttttacgtgacaacggcggctggtctcgtctagaagaaaggagacgtcaaatatagaacctaaatgctgaagtcagaaaaattctttcattttgttttcaggttctcgacaaggagagggatcgtgcacttattgcaggggctcgtatatcgaacggcttgcggtcttatgatgaaaattcatcgcctgtaacaagaggatacaaacaggaactgaaaagat

SEQ ID NO: 862 - DNA, 399 bp, Cyanidium caldarium
  Clone ID: LIB190-017-Q1-E1-B8
ccacgcgtccagcaaatattctgtcctgctgatgattacaacactcccacaccacagcattacacacctacaaccaacacatcaatttgcatgcatcagactgtgatacaatgcaacggatacgtttaataaaatcaaatcatgggggagggagattcaaagaggtttgaacaaagtgggcccttgcaaggtagaatatcttcactatgatattgaagaccttctcatcgattcagctgatttatcacaatctctggtgatgacttaataagttggcaacatacactaaccacacttcgtccgaaaaatgtaggcattgcaatactacatattcaggatatactttttttttcatacaccctcgtatctaaaccctacaaaacccatctgtagaattgt

SEQ ID NO: 863 - DNA, 222 bp, Cyanidium caldarium
  Clone ID: LIB190-017-Q1-E1-C12
gtccacaggaaacttccattgagtgccttccaaagcaaatacaattgctggacaaacaggaactggaactgttagatttgaggaagagggtatggcaactcataaagaaaggagagtgtttgccacgtttggactgtgcagacgtgggactgcgtcctactattcaaacaagtaaaaccacacacttcaagcctggtgaccactgtttggagacgtattttc

SEQ ID NO: 864 - DNA, 416 bp, Cyanidium caldarium
  Clone ID: LIB190-017-Q1-E1-C2
gcgtccgccagcaagtccgcccacgcgtccgcccacgcgtccgggaattctcaaccagcgttagcttttcatctgaaaaagacaaatccggttttgcaggattaacaaggtcttcaaattatgggggagttgaacctcatcgacgatgtttcgaatgagggtgtacgcaaccattcgagtgaagatggctacattacagttgttctcgcaggagtagacatgaaacacgtaaatattacgaggagtgaagacaatcaagttgaaatggaagttgcatttcaaagtgacgatccccacaatttcctattctggagagaaactattttatcttcaacaagaacagtaaatggcacaaagtttacatgtttcagatagaacttggctttcgacctatacaagagtacatggaaaacatg

SEQ ID NO: 865 - DNA, 395 bp, Cyanidium caldarium
  Clone ID: LIB190-017-Q1-E1-C3
gcgtccggaaagagaaagtatagagtgtgcggcctgccaaataataaagaagaaatcgatgaaagtgaaagcgagtaaaagatgaggtatagagaatggcggtcctaactgtaaggatccaagggtggcgaagtaaatagacgtttgaaaggcgtgcggtatgaaaggagaaacgagtgtagcactgtctaatcgtccaactcagcgaaacagcaataactgtgaaaatgcagtaaactagcagtaggacgggaaagaccccataattcttgactagataggtttagggaggagagagaatcatgaagtagaggaggtggtttattttatgaaagaccactgcatgaggataacgaatctaactgagtaaggaaaataagcttaagctaatttgg

SEQ ID NO: 866 - DNA, 418 bp, Cyanidium caldarium
  Clone ID: LIB190-017-Q1-E1-C4
gcgtccgccagcacgtccgagagaaatggcaggcaacgtggaaaaaacacttgacttgattttgttggcactagacgaagaaatactggtcaagttgcgtggagacagagagcttctaggaaggcggaggttggtacgaataaatatctcagtggggagtgttgatatctattcaggcgtttgatcaacacatgaacttggtgttgagcgacgtcgaagaaaccgcgttgaaggtggaagtggataacgaaacgggagaagaactgataaagtcggtaaaaagaaagatgcccatgttgtttgtgcgtggagatggcgtttaatagtgttgctccaccccttcgaacggcctaggaagaacgtatgtgtaaaagctattctcaggtttcttgggttctcgacgaagagtgatgacacc

SEQ ID NO: 867 - DNA, 466 bp, Cyanidium caldarium
  Clone ID: LIB190-017-Q1-E1-C5
cacgcgtcaaccagcgcgtccgcccacgcgtccggccaatttagtacaaatcactttggtgcagtattgccagtgacagtagaagaaacataagaagtccaaactttttggactctactttgagggctatctacactggcaatgtaaatacaagggggagtgtcaagttatccctttttgtaggaagagagtgacaagggagttgcgttaccaagacggcatgtctaggcactcggcgacacaaaaagataatgtgtagggcaaaacactgaatgagagtcgatatagagtgagcgtgcatgtcactggcaatgtatcatttgttttttcgtccgttacatagccagctgtcgtgtcattgtttcttgcgttagttagctcctgtataacaatgctaccaagccttcttgcaatcgtccaggcacatcagcaatttataattcaagtttgctttggaaaaccaaac

SEQ ID NO: 868 - DNA, 462 bp, Cyanidium caldarium
  Clone ID: LIB190-017-Q1-E1-C7
cacgcgtcaaggacttgattggtgttgtggtttgtgagagacaaaaagtacggaaaaggaacaaaagcagttgcgtattcttgttacaggtgctggaggctttattggctcccatcttgcaggggggctgaaggaaaaaggccactatattagcgggggggactggaaagaaaacgaatattttaaacaggaagacttttgtgacgagtttcttcttttagaccttagagagctccaaaactgtatcaaggcaactaaggactgtgaccacgtttacaatctggctgcggatatgggtggtatgggttttatacagtcaattttttctgttatcttgtataacaatactatgatatcgtttaacatgctggaagcagccagaataaacaacgtgaagagatatttctatgcctcctctgcctgtgtgtatccacaaaataaacagctacaccccaaaaatcc

SEQ ID NO: 869 - DNA, 449 bp, Cyanidium caldarium
  Clone ID: LIB190-017-Q1-E1-C8
cacgcgtcaaccagcgcgtccggctgaaccattgggaaagttaaacactggtgcaactattcctcttcgtggctttggaacctggaaagctgagcctggagtggttggtgaatgtgtgaaaggggcgtatgacgtcagttacagacactttgagggtggtgctatatatcaaaatgaaaaggaaattggacaagctttttcagaacttttctccagaggagtgaagagatcagacatatttgtcacttctaaagtgtggaatacctgccacgatcctcaaagagtggtcgaagcttgtaaacaaactctgcaagatttatttcttttttatccagacctttacttggttcactggccttgcaactgggagtttacgggtctgcctattactgcagataactggattcccaatgatcaggatgggaacatacagttttccaaggtttcac

SEQ ID NO: 870 - DNA, 372 bp, Cyanidium caldarium
  Clone ID: LIB190-017-Q1-E1-D10
gcgtcaacggacacgtgggcggacgcgtgggcggacgagtgggattaaattgttcaggtcataagaaaggaaatggtgatggaataacttctgtttcatttagtcctcgttggccttggggtattgcgactggttcgttgggggagagggtgagagtattcgatgtagagaccggtgaacttttgcacaattttcgtcaacatgcatattctgtatattctgttgccttttcgagtgatggaagatatctgctatcacgttcacttgataagaacgttatattatgggattctgcatctttttctttaaataactatacaattttcaaaggccatactgactttgttttgtccgtcccaatttactctaaat

SEQ ID NO: 871 - DNA, 287 bp, Cyanidium caldarium
  Clone ID: LIB190-017-Q1-E1-D3
gcgtccgtaatgaaataccttgcatcagccagtgagtataagatcatgaggaggaagtataggaagagaagaagtagaagaaatagtgaaggtaataataataggagtaatggtgagtatagggaggaacatgaggaagaaagaggcaaatacgggagggcagtaaaacaagaaagagaaaggaaaaaactgagtatcaggaagaaaacacggagtacatgatgaaagaacgatcaacgaagtaacactaagacaaggagtaatctgaatgaaaccaggaaagtatt

SEQ ID NO: 872 - DNA, 447 bp, Cyanidium caldarium
  Clone ID: LIB190-017-Q1-E1-D6
cacgcgtcagccaaagcgtccgtttggaagagctgaggagaaggaaaaagccaggaggcaacaagaagcgttgaaagctcaagtggggaatacctgcaaaatcgtagaagaaaatactgaaagtgcggtttccaaaggtttttcagttgcttgtgggggggacaaagtgcaatacaacgcgaaaaaacacatggagaggaagcgaaaaggagagtgcaggacgcttcgaaaagacggtggatgtttccgttgttggaagaagagtcgagtgatgaggagcaggaggatagtacgacaagtccaactacttgtttggatactatttgtttcccgtcgtcaagtgaaacattgttgcctttatctgtataataacttgtaataacacacataaataaatataactagagatattgtttctagatgaaaaaaacacaaaaaaggccgccg

SEQ ID NO: 873 - DNA, 435 bp, Cyanidium caldarium
  Clone ID: LIB190-017-Q1-E1-D7
cacgcgtcagccaacgcgtccgaatatttgtgcgcgcgcgctcttatttttttttttgctctttcttggatgagaatcaatcctttattaagaagtgatgggtctcctgaaagaaaagaagggggagcattcgtatgggactgtagttttgtcggtggggaatattccataacagatagagatgggtttataaaggaggaatactttgggtttggacaagtatatgtgtcattgtttcgactggtattcatttggaagcctccttgctgtcctcaatatcgagctttggagttggagttgagtagcatgttcgaagaatttttttttttagagttgtttgggcctcctgtatttcgagtaaaagtcaacgagtcggtggacaatgaacaacaacagaacggttgtctgacagggtttttggaattttcttgtttt

SEQ ID NO: 874 - DNA, 295 bp, Cyanidium caldarium
  Clone ID: LIB190-017-Q1-E1-D8
acgctaaagaattgacgcactagatcacaaactcacccatgcaagtaggtaactcgaatgggttagtacataagtgtgaaacattggaacaacatgaacgcggagagaaactcctatatacccatattcaaaggcggcacgtaaataggacccggaatctgacaggaggaaagccacattgcaacctgacaaaaggtccacagccgcagaattcatcactacgaataattggcctgtctccaaggaagttttacccagtattgcagagtccattaaacagaaattgtattacaac

SEQ ID NO: 875 - DNA, 290 bp, Cyanidium caldarium
  Clone ID: LIB190-017-Q1-E1-D9
gtcaacccacacgtccggaacgagaaaggcgtcgacgacgaaagaagatcgctgtaggaacaacgacataaaatgtctgttttattacaaagttcggattttcaacacattcttcggagttctgaataccaacattgatgggaagaggaaagttatgtatgcgttaaccgccataaagggtgtgggtagacgtttctccaatttagtcttaaaaaaggcggaggttgacctgagtaagcgtgctggagatttgacgtccgaagagattgaccgcatagtcaccatcatgc

SEQ ID NO: 876 - DNA, 325 bp, Cyanidium caldarium
  Clone ID: LIB190-017-Q1-E1-E10
gtcaaagtaaaatgagggaatgaagggaagttatgacaaacacacctgccagcagcatcggtaaaacgtgtgtagcaagcgtacagcagaacaactgggtgtaaaggtcgagtacgggactaagtgtaaaacggacaggaggggagagagagaggaaagggatgaaatgcagagatctctagagaaaggcacgacagaacagaaacgaagacacagtaaatgaggcgagaaagcatacgaagtgaaacggattacgaacccgtgtagtctatccagtaaaagacacaatgagtaacattttttggattcattccaccaggggagt

SEQ ID NO: 877 - DNA, 310 bp, Cyanidium caldarium
  Clone ID: LIB190-017-Q1-E1-E11
cgtcaacccacaagtccgcccatacgtcaaattataaaacgaaaatattaaaacgaaatcagtcaataataagacttgtactgaaagatcaaacctgtttcatattttctgagttcggggaccaattaaagtttgaaattggagtcgggagattatatcagaattgggagtcttcataccagcatatgacgaacactgaaacgacagcgacgaccaacaataaccgtccaacaatctacaaattcttacattctctaatttttagaatccttgttttcttatataaagttacccaatttttttttttttt

SEQ ID NO: 878 - DNA, 303 bp, Cyanidium caldarium
  Clone ID: LIB190-017-Q1-E1-E12
ctcatccgttactcgtgaaatgggaaaacttttatctcacacagcattgttaacttgtggccattcgattgaagacccgtcttcatttgccgggacagggggtcacatgaccaacctcacatgggcagggaatcgtcctccggctgagcacactaatcattccactgccacgactacacaaactcctcaaatgacagttgttcaagaccgtcataacacctcatatgaataacctacttgcattgtgtccgtttgcccctacaaaacctcccccccttttttttttttttcggccgtcccccc

SEQ ID NO: 879 - DNA, 331 bp, Cyanidium caldarium
  Clone ID: LIB190-017-Q1-E1-E2
gcgtccgataaaacagaaaagctttcatgagaagtgaaacaaaaaaatttgtcgtttttggcgccttttgtgtatcagcgctttctcgtgtgtttgtttacttggaaccctctgttgattgggggttttcattctaatttctttgtactcaaagggagtcgacggtttgttacactgactgttggtgcccctgttttagctcttgccgctagtctttcgtttgcgcattattatcgacgcaaaagtatgccgatttttgcaaacgaagacacatttttcgagtgaaggcacaatgtttgcgaaaataaacaatagtttcgtgattcttttg

SEQ ID NO: 880 - DNA, 212 bp, Cyanidium caldarium
  Clone ID: LIB190-017-Q1-E1-E4
gcgtccgagactagctgtttgcttgttcgcaatatgtggtcaacaatgaaagtggttctgctgctcaaggcttagtcgcgcctgttattcaatttttataaagaatttataagaattgtaagggggggagttatactttaaaaaaaaaaaaaagagagggaaaataatcaaaatacgggggaaaccgtcaaagatattatgtaaaccatgaa

SEQ ID NO: 881 - DNA, 450 bp, Cyanidium caldarium
  Clone ID: LIB190-017-Q1-E1-E5
cacgcgtcaaccaaagcgtccggtgttgttgtcgtgtacgagggtaagacatttgttgagctgaagagtcaatgaacaagcttcagttgctatacgtaaccaaacaagctgtttcaaaagcatgggagagagaacagaaaaggttatactccgagagggaggtcagttgcagaaggaactttgggaagcaggtggaaggaaagagaaactgcacaagagagcgcgtactttaatcgtgaagatgagcaggcagtacaaaggttagcagcgaaacttcggcagcaaattgagccatcggaggaagtactcgcccaacaaagaaattttttttttagaaatcttacaaaagcacggtgtccagcccaatcaaagtttgattgaagatattgtccgtttctttcattaattcccccgtgtttgatgtttaactgccgttcaactacaattttg

SEQ ID NO: 882 - DNA, 462 bp, Cyanidium caldarium
  Clone ID: LIB190-017-Q1-E1-E6
cacgcgtcaagtacaaagcactgctatttagtgtactgcttcataaacacaatatccacgacgctataatctacactaattgtgctgttccagcttctcgcgatattgctctggagcttccagggggtgctctcaacataaaggttcttgtgggggggggaactttgtatcttacccaagaagctgctttttgaaacgcacgaacatagaacagttggacgagaatatcccacatgaaacagctacgaacccttgtaaggctgtagtgttatcctgtttgcaagcaagtttgaacctaatctactagttatattgcctttaagtcaatttacttgcaagaacttctctatctggaaaggacaactcgatcacataaaaccatggaaacttgggactgaaccactgtactggcgacctgccataaagtttttacaaatcgttcccagcaaacatatatgataa

SEQ ID NO: 883 - DNA, 445 bp, Cyanidium caldarium
  Clone ID: LIB190-017-Q1-E1-E7
cacgcgtcagatatctccttctcacccaactagtagaagaatatgttggcgtttacttgtctcccagactgtcgttggttagagacttctcgattctccagatgtgccaaagccaataccgtgggggtgcgacgtagttcccagtgttcacacgcgggggagagtgtttcgatgaactacagtccctattcgataactaccgacaagtcagaaggacatattgtccccggtactttttcaagatttgagtttcttgaaggtcgagtcaccggtccaaccgtcttgaaccctagcatacttgactttacagtgtcgaatgtttttttttctgcctttggagaatggagagcattatcggcttcaagtatagcgagagaactggaacacataacaaacgtcacccacgcgacaatagaaagtctcaagaagactcctaccgaaaagt

SEQ ID NO: 884 - DNA, 304 bp, Cyanidium caldarium
  Clone ID: LIB190-017-Q1-E1-E8
cacgcgtcagctatagcgtccagcacgtaccttttgcataatatcaaaactattaaaagacgaaccctttatacacaagtacaactaaccacttaacacccgaaaccagatgatcttatgccggcgaggccaattcaggctgaaccattatctgtggggggtgatttagaagacatcgcatatcgggtaaaaggccattcaaagcgattgatagcttctacacctcgaaagctatatctttatcgtatgcagtaaagtagaacgtatacgaagagacagaagagacaaacagggactatcatcg

SEQ ID NO: 885 - DNA, 314 bp, Cyanidium caldarium
  Clone ID: LIB190-017-Q1-E1-E9
tttctatggctgcaatattcatctgcaaagcttgcttcagatcttttcctatgcaacatttgtttttcaacaacgcacagaaaaaaacaattttccaaggtggcaaagttaacaccagtcttttgtttggagtgaaaaggaagttccatgcagattcaacctcgctttggaaaagcaccaatactgtaacttgcaaattacagcctaatttttttaacaacttattaatgggcttttctgctggttgtatcgcctcgcttgtacgagctggacgaggagttttgtttacacctttttttgtaacggtatcagac

SEQ ID NO: 886 - DNA, 115 bp, Cyanidium caldarium
  Clone ID: LIB190-017-Q1-E1-F1
gcgtccgcaagcaccagcaaacgacactaagttgaagaatgcattaaacatcacctcattcttgaacgacctagcagctggaggtgtacctggggcaacctccaatatggctgtc

SEQ ID NO: 887 - DNA, 441 bp, Cyanidium caldarium
  Clone ID: LIB190-017-Q1-E1-F11
acgcccgcgtccgtggcgatgtcggttgggattcctattaaactgttacacgaagcagtgtcccaaaccgttactgtagaaacaaagagcggtgacctttatcgtggaactttacacgaggcagaggataatatgaattgtcaactgaggaaagtgacttgtactggaagagacgggaaaatcactccctttgaacatgttttccttcgaggtagtaaaataaggttttttatcgtcccagatatattagcaaacgctcccatgttcaaaagagtggaagctattaaggaaggaaagactggaacatgtcttgggttaggaagaggtcgaggttttattggaggtcccctataaaccaagatacgttgcagaaattaaaaggggccgaaacctcccaaaaaaattcattcttagaaaaacctatagacatatatacgccca

SEQ ID NO: 888 - DNA, 308 bp, Cyanidium caldarium
  Clone ID: LIB190-017-Q1-E1-F12
gcgtcaaaaaggaaacaaagctattgcagcagcaacaacatgtgagattgattcttatcgcttggacgccacaaagccagtaacggtgaaattctcttttcttgcaacaacaggaaatagccgcagcgcatgcaaggattttaggacagggatttaaccacaaaagatgagagatgaatgcctacttattttgatgcatactgcgatgactaggtctctgcgtacttcgtttactgaatgtgggtaatgttcatgctatttataaaggttttctgcttgttcaacatttgttaaaaattttttttttt

SEQ ID NO: 889 - DNA, 396 bp, Cyanidium caldarium
  Clone ID: LIB190-017-Q1-E1-F2
gcgtccgtgaaaactttgtcttttctatttctttccaaatgtataaacactgcaactgcctttttaatcaaaaagtaaagatcttcgggtatctcaggagccaatccattcgcctttaagatgcgagctatcttattgccagtaacttgtttcacgagaggaacaccttgagagtcacgtagatgaacgccaatttgcgaaggaactagaccttttctagccaacttgcaaatcatatcgacaacttcgttcggtgtcgtttttacccacgagggtgggttccgtttatagggaattaccgactgggcaattcccttactatttttatccctgaatatatttcaagtaatcgaacagaataaacttaccctttactgtgcatacgccccatgtttc

SEQ ID NO: 890 - DNA, 263 bp, Cyanidium caldarium
  Clone ID: LIB190-017-Q1-E1-F3
gcgtccgctacgaggtagaatgattcggctgcacatggatttaccatgacttttaatactgtttcgagttccgtcatttgctcttgtatgagtttctcataacataaactctgttgctgccaggggttggatgacgactcggcttcttctccaggggggaccagtcaaagtgctccttactcgattccgcatgaaaaagtgaggaataaatatgaaataattgttcatatgaaaaacaaaaaaatcgccaaactatcgtaaac

SEQ ID NO: 891 - DNA, 153 bp, Cyanidium caldarium
  Clone ID: LIB190-017-Q1-E1-F4
gcgtccggaacaagaaagaacgagtataaggagacaagtaagaaaaacgaagacggacctaaaggaggaggaggtaaagatgactaccagacacttatggtagtacgacgactaatgatgccggggggatgacggataatacggttacgttat

SEQ ID NO: 892 - DNA, 440 bp, Cyanidium caldarium
  Clone ID: LIB190-017-Q1-E1-F5
cacgcgtcaaccaacgcgtccggtgtgtttgtgtgattggttagaataaaggcgcctattttcaaagagtccaacctagtgagaaaacatgaatccggaatatgactaccttttcaagttgtggcggatatgcgactctggagtgggaaagtcggggggcttgttgcgttttgccgacgacacttacaacgagagttatatatcgacgattggagtatactttaaaattcgcacgatagaactggatggaaagaccgtcaagcttcaaatatgggataccgctggacaagaacgtttccgcactatcacttcttcatattttttttttttatacggcatcattattgtgtatgacgttaccgaccaggaatcgttcaataatgtcaatacctggttgcacgaaattgatacatattccaatgagagtgtgaacaaacttt

SEQ ID NO: 893 - DNA, 436 bp, Cyanidium caldarium
  Clone ID: LIB190-017-Q1-E1-F6
cacaagaaacaacaactgctgcttctccaaccagacacggaatgattggcataactcgaatgactctagatttgcttaccagctgctgttctattgtcccaatcgacactcctgcgcaaatgggggctagaaggtgtttttccggtttccatcggtggggttatggacttaagagcttcagagactacatcaggctttactgctaaaacgatgacgtcagcatgcaatatctcaaaactgtttttacaggtccctactcccattttctgaaaaagatccagacgagactcaactacgtcatagacagtaacacaagaatttattatttttttcctttctataataccccgaatgatggcttctgcaaaacacctccacctaagaaacccaacctcaacggcaaagaacgttgttccataccagtgtacaactttgc

SEQ ID NO: 894 - DNA, 423 bp, Cyanidium caldarium
  Clone ID: LIB190-017-Q1-E1-F7
cacgcgtcagatagaaaatcatggtagacactaagcttaaggacgatgctagtgctgctctttggacttgccgcctatttctctatacagttgtgttagcattttcagcaacaataattggggttgatggaaggaaggcagataacatatggagggaggccctatattatcatggaaaagtggtgaacttttgtgcatattcggcttcgtctgtttttgaaggtggcgaccatggcgcatgtaaatatgtgatggctttggcttctatcagcttgattttacttttctttctttggttggcctcctttgtcgacgcattttatttttttcctacaaagttctggtttgtggaacttggtatcaacatattccttaatatgtggtggttggttggtgcaattgtggtgactgcaaagcgacctt

SEQ ID NO: 895 - DNA, 360 bp, Cyanidium caldarium
  Clone ID: LIB190-017-Q1-E1-F8
ccacgcgtcagccaaagcgtccgggaagtataaagaagagagtgtaaagcggcgtcataatagaaatccgaaaggagtagaagaaaagagagagaagaaagaaaagaagagaaaaaggtaagagagaggaccgaatcagggtaagaggtataggagggggaggagaagagagaatgctgggtggagtaacgaaacaagacaagggaagtaaaatgtaagaaagaggaaaggtttacgcagagaatgaactataaataagagagtgtaaggcggcgtcataatagaaatccgacaggagtacaataaaacacagacaacaaagaatttatattttttccgtactgaaaaccgaatcagggt

SEQ ID NO: 896 - DNA, 311 bp, Cyanidium caldarium
  Clone ID: LIB190-017-Q1-E1-F9
tcaaaaaaaatgttgttggttattcaaaaaaaaaaaattaaaaacaaaataaatttataaaaaaaaaaaaaaaaaaaacaaaaaaatataaaataaatacatatcaaaatgggccgtggccccatatgttccataccttacatggctgggtcatgcaattttttactcctcctcaaactttaacacaatttcaattcacatcctctcattttacaacctcttatttcttaaaactttttcttttttcaactaaactcccttttatcacatccccttttcaccaactgccttaatacctttttttttttttt

SEQ ID NO: 897 - DNA, 283 bp, Cyanidium caldarium
  Clone ID: LIB190-017-Q1-E1-G1
gtccgcgaccaagtcggcggacgcttgggtgagcaaataaaacattggaacgtttttatatgagttgggcaaagcatgaactacaaacacctccatattacttatatacttaatgaaaagggggggacatctacaagtagtcaataatactgggggggggtcctattttgactaccactgaaatataaagtttgcagtcacaactctctttcaaactgccaaccacggcattcggtcaaaacaccctttcgtttcactacaatatacacccgaagttttactt

SEQ ID NO: 898 - DNA, 352 bp, Cyanidium caldarium
  Clone ID: LIB190-017-Q1-E1-G11
cgtcaacccacacgtccgaaatattgaagcagatttgtcatcacgtacaaaaagaaatagaaaagcaactggcagagaggaatgtgcaagaagtgattcgttttgatccgaggctgagggaaaagggtttgttggatggtcagagtgggaaggtggatgttccggatactatttaacaaaagtgtgtctctcataaactatttcacttgtatgtgaagaacaaaacagatattttttttatcattgaaaaggactcctataatttggtggatacgacaaggaaaatatcacttggcttgtttttattcgatcgaatctttgcaattgttttttggctgcactgtgcgatggg

SEQ ID NO: 899 - DNA, 421 bp, Cyanidium caldarium
  Clone ID: LIB190-017-Q1-E1-G2
gcgtccgaaatgtacaactcgttccagagcaggaagatgcgacaactttgcaactaggagaagacttttcgagtgaaaaagcccagccacttactattagtgaagtttttattcttttgtcgcgagggagagatatgatgcgagagttggaaggcgggagagcagatgaattttcaagtgtctttaagaaatttttggaatatgtacagcgctttgaccgttacaagggtcttgaagctgcaaccaacgtccgaaacctgttgcaacgatatgataatttggatccctttgaaatggcttgtttggctaatctttgccctttttattttaagaggccaaaactattattccaagtttaaagcacaaaatcgacgactcctcgttgaatcagttgcttcaagacttatcttccttcactcac

SEQ ID NO: 900 - DNA, 433 bp, Cyanidium caldarium
  Clone ID: LIB190-017-Q1-E1-G3
gcgtccgcgaacacgtgggggccagtttcctcaggagccaataaaaaaactttttgtcaaaatattatcttcgaagctgatagtatggaggaaatttgcaacaattatttcttcgcttctaggggtgctttgggcctaggatgcctgaaacattgggggagaaggtgcgctcacctggattgtctgtcacaagaccaaggggaaagacttacaccagagtacacgtctaacgagtgtactgttcaaaatatttgtttccctgagcttgcaacggagatatctcaagatgaagttttagagaactatctacttgatgattatttttttttttccaaccataattttgtgatcgaaagttggcgttcattccaaaaagatgatttttcgttgtcagataacttctctcaagagcaaacgtctttttcacaagact

SEQ ID NO: 901 - DNA, 282 bp, Cyanidium caldarium
  Clone ID: LIB190-017-Q1-E1-G4
gcgtccgccagcgagtccgcccacgcgtccgcccacgcgtccgacaacacgtccgcccacgcgtccgcccacgcgtccgcccacgcgtccggaaagaggcaaatacgggaaagcagtacaagaggagggagaaaggaaaaaactgactatcacgagggggggacggagtagatgacgaaagaaagatcaaggaagtaacagtaagacaacgagtaatgtgaatgaaagcacgaaagtatttgaacaagagagtgtaaagcgcgtaccttttgcataatgtcc

SEQ ID NO: 902 - DNA, 439 bp, Cyanidium caldarium
  Clone ID: LIB190-017-Q1-E1-G5
cacgcgtcagctagagaataccagctcacctacttcaatattcgtagtataggcgaacctgttcgtctactatttgaagacaatggcatcaaatactcggaagagagggtagaagctggcgagcagtggcaaaaactcaagcaagaaggtgtgtcggggggcaagatccccttttgtcagatgcctgtattgcgcgatgggagcatgtatttagcgcagagtggtgcaatacttcgtcatttagcgagaaaacataacctctatggagacacggaagaagagaaagcgttggcggatatgatcaacgactttgccaacgatcttttttttccgtacgtgcgcatgatttacagtgatacgtggaacgagatgttacccgagtatttggaaacggccaagaagcaattggagttattggacaagtatttgactcgtcggg

SEQ ID NO: 903 - DNA, 273 bp, Cyanidium caldarium
  Clone ID: LIB190-017-Q1-E1-G7
cacgcgtcagggacccaccgcgtcattccttgttgtgtatccatgaaaagtttccacctcatatcgactagttcgtactacaacagtttctttcaagcgtggattatcgcaagcacttaagggggatgacgctacttctgcttcacaaacacgggggggttctactccgggttcctccttacatctccaacgaaatacccacatatgctgtcaagttttcactcaaaccttttgctacccacctcatccaagctccataacccattgcttacc

SEQ ID NO: 904 - DNA, 456 bp, Cyanidium caldarium
  Clone ID: LIB190-017-Q1-E1-G8
cacgcgtcagggacacatggcctccgagtatcttgggtatattagaacagagaaatatgacaaagagccaagtagacgaaaggaactgatcgttaactgtgagaaaccattcaacgcggagaggaggccggatctccttcctagaagcttctaggtgggaaacgacctcttttttgtaaggaaccatgcacctgtgcctctgttgaagagtgaagaagagttcagacttcgagtagaaggtattgtggcgtatccactacttctctccctggaggatctcaagacaaagtttcggaaacatactgtcgcagcggtgttgcagtgtgcatgaaacagacgtactgaaatgagtcgtatcaaaccagttgatggagttccttggttacatggcacagctggtaacgcaatttggtctggagtattactcagggatgtgctaatagcacctggcgtata

SEQ ID NO: 905 - DNA, 245 bp, Cyanidium caldarium
  Clone ID: LIB190-017-Q1-E1-G9
gtttttaaaaatgaaattgaccccataggtggaacaagaaacccaaaggacaaccaatatatgaaaatgactttgaatcaacttttgggggaattggatggctttaaccccaaggaaggtattattgtaattggtgcaaccaactttcaaaagtcgttggacaacgctttggttcgtccagatcgttttgatacgcatgtggtggttccctaaccctgacgtggaacgtcgaagacagatactcg

SEQ ID NO: 906 - DNA, 350 bp, Cyanidium caldarium
  Clone ID: LIB190-017-Q1-E1-H10
cgtcaaaagaaaaagctagactacgagaagtatctcagcgggcatatgcggaaatggaaaatgtgcgaaagattgcccaaagagacgtggaaaatgctaggaaatatagtagcggtgggtttgccaaagacttgttggaagtggcggggaacttggaaagagcactacaaaatataccgtcggagaaactcgaccctgaaaagggagacgctatcgtgatcggtttgtatgaaggggtaaaagctacgaatgatgtattacataaagtatttcagacgtatggtattgaaaagtatgatcctatttgagagaagtttgatcccaatctacatcaagcaatgtttcaagtt

SEQ ID NO: 907 - DNA, 392 bp, Cyanidium caldarium
  Clone ID: LIB190-017-Q1-E1-H2
cgtccgctataaatggcatggaatcataaggcctacacacaaatgactatcagcgcatcatgaagtgtgacatggatattcgaaaagacttgtatggcaatgttgtactttctggcggttcgaggagtgtttcctggtattgctgacaagatggaggggagctaatcatcgtttcaccatcgtcaatgaacataaagattgttgctccagcggaacgaaagtactccgtatggattggtggaagtatacttgcatcgttgtccacgtttcaacaaatgtggatcaccacacaagaatatgaacaaagcggccctggtattgtttttctataatgcctttaacagccttgcactgcaatgtgccgtacgttgaccgacacaattggaacaata

SEQ ID NO: 908 - DNA, 463 bp, Cyanidium caldarium
  Clone ID: LIB190-017-Q1-E1-H3
gcgtccgccaacgagtccgcccacgcgtccgcgaatggtggctataccagtgctggtgctaaagcaacgtctagtcaaacaggaggaaatgccaagtctcaagcacagggatcaagtactggggcgggctcagatagtgctttgagtcaagcacagggtggtttggatcaggcagaaagcagtgttcagagtcaaggctcttcttcaaacggaggagactttggttcactttctggaagcttctttcgtcaaggtatacaagtaacagcttcttcgaacaattcagagtcctgctctaccgtgggtccttttcagcttgactctgtattcttttcgtttgtggaaactgcggacggcatggcctatttgcagatttgcagcgcttcttaaatcttctgtatttttgtgtgtttatagtatttcaaaattctgatcaagggcatcacaacgaataaaaaccttt

SEQ ID NO: 909 - DNA, 440 bp, Cyanidium caldarium
  Clone ID: LIB190-017-Q1-E1-H5
cacgcgtcagaaaaaacccaaacaagaggagagtcttcggaaaccaatattgtctgggtagatatcacaggaattgttgagttgttttggaaaaaatggaaaccttgtttgaacaatagggaggcggtcctttgcagcattctcgatagtggcggggggacggttatttcgacaggtttgttgaatagattgatgcttgaatttccttgccaaggactcgtttggaaagcacaagactctcttttgcagtatgggcgattagaaaagttgttatttttcttcacacaagttgaccctttagcgaatcgtcgtttattggattttttataatatactgtatatttgctttgttgtttgtccgatgatcaactttaccagttgttcactcatttggaagccttgcacgaacatttatggaagtgtagagaaaatggaaaatg

SEQ ID NO: 910 - DNA, 264 bp, Cyanidium caldarium
  Clone ID: LIB190-017-Q1-E1-H7
cacgcgtcagcgaacgcgtggggtgtgtgtgggtggtgataaaaaaaaggcacccaaaggatccaaaagtgtacccgttgctggaaaaaagcccattggtaaagcagaagagaaaaaagccagggggatacgtgcagaatcttacagtatatagggggggaaagtgttcaaacaagtccatcctgacactggtatatcttccaaaccaatgaccatcatgaattcctttgtcaatgatatatttcaaaggattgcttcctagtc

SEQ ID NO: 911 - DNA, 330 bp, Cyanidium caldarium
  Clone ID: LIB190-017-Q1-E1-H9
atcgacatttgtggtggagacactttcaaagttcccttgcacaaagtccttttacgagttttcttttagcaatatttgctggtgcaaccacttattttgcgggagataccttttacaaaacggttaccggggagttggacgagtcgattcaacagcgaaaagagttttatacgcaaagaagagaagaaaccacaaaaaagttggaagctttgggagtcgtcgtggacggagatgacagaaacacatctttataaggaaactttggtgatatagcttccaaatattttttttttacacaagtaaaacagttcaaaaacaaaacaacaaaaa

SEQ ID NO: 912 - DNA, 264 bp, Cyanidium caldarium
  Clone ID: LIB190-018-Q1-E1-A1
agatgtgtttgtggtgggaagattgacgacaagcaaaagaacaaaggaaaaggagggaagaatcgtcgtcgaggaaagaacgacaatgaagaacaaaagcgggaacgggtgataaaagaacagggccaagaatatgcgggggtgactcgcatgttgggaaacggacggtgtgaagccttatgtttcgacggtactccaaggctatgccatattccagggaacatgagaaagaacgtttggattaatgccggagatattgtttta

SEQ ID NO: 913 - DNA, 336 bp, Cyanidium caldarium
  Clone ID: LIB190-018-Q1-E1-A11
cacgcgtccggttctagatagcgtgataatatcccctttttgtttgtttatcgtttgtcaaagtttggttgttttcttggtagcagttgtacattcaggatcggcaaatgccaaagggaggaaagagagatggggtcaaagaaagaagccacaagtaaacctgcagcagcagatgctacaaagacgacagaaaagtctggtccggaagccaagttgaagggaactggtgcaaagaaacaataaaaagttgactatgcatgttcctgttatgttttgtgagttctgttttatattttccagctattcttttggtagtgaataaagagaaaatttttt

SEQ ID NO: 914 - DNA, 369 bp, Cyanidium caldarium
  Clone ID: LIB190-018-Q1-E1-A12
acccaagcgtcaaagatgctgtcaaagatattgggtcgttgttagattggatagataagcagccatttctagacagcgaacgaattgcactattaggaggctcttatggaggatttagggttctttcgtcggttatcgaatatggcaggaggattcgtgctgctatcgatatggttggaatcagtaactttgttagttacctagagaaaacttcagcttatcgaagagatagccgaagaaaggaatatggtgatgagcgagatccggaaatgcgcaagtttctcttgtcgatatcgctattcattctttctcaccttattcaagtgcctctttttgttgcagctggacaaaacgaccctccagtacctg

SEQ ID NO: 915 - DNA, 351 bp, Cyanidium caldarium
  Clone ID: LIB190-018-Q1-E1-A3
agcccacgcgtccgcccacgcgtccgctcccaaaattccgatgtactgcactgggattccaaagtgtcgggcaaaaacagcgatgagataaagatatatactcttgggtagcccactagctgcagataaaacactcgggtagcgtctgttttcatcatccaccagagaatcctctctcaaaaaaattcctagatattctgctgccagactttttcaagggaaaatcttcgccgaacttttttggcaacaaaagtgaagaagcaacttccactgatgattttcctccgtaaaattttcttctccgccaatttcaacctttttccccagtaactctgaaactttagtttccaa

SEQ ID NO: 916 - DNA, 436 bp, Cyanidium caldarium
  Clone ID: LIB190-018-Q1-E1-A5
ccacgcaaccgcaaacgcgtccgcccacgcgtccggtcatttggtgagcaagagacctcattgtgtgtggcacatggctaccaagatagtattaagaggtggtggtaccttatggaacaaactatggtctgctgcaagtacccgttcttccgttacggggtctcctcaagggttggcacaactgcatacctcagctcgcccgtcgtttaaagtgcaagacgctgattttatgcgttcggatcgtttgtacaagcttgcagtcaaaccccctaaaaagtggaaattgctactcttttactggacgtttgtgtccactgcactattttttctcatattcgtgggttggtattccaacagaaaggctggaatttggtagcaagctttatttccataagatatatagatagatggatatataaatatatgtccgtttgtt

SEQ ID NO: 917 - DNA, 429 bp, Cyanidium caldarium
  Clone ID: LIB190-018-Q1-E1-A6
ccacgcgaccgcaaagaatgagacgttggcttgggaacggaaacttgacaaaacaacaaattttacaacttgttgctcatagagatccttttctctttgttgactatgctattgaaaataagataggtgagagtgttgttgcagtaaaacaacttgggggagaagatgttcctttctttcgccacaaacaattggagtttatgggtcaagcaggttgtatactagtcaaacagtgtccagaattttcggaaagttttcccgtctttgttggaatgaaagacgtttgttggaaagtggaaatattggagccaggctgtactttattttgtaaagcaaagttgaaaggacatccgagagaaagatttggtatagtagaaaccgttgcttggaagcaatcttcggataaaacaacattttgttctggagaac

SEQ ID NO: 918 - DNA, 455 bp, Cyanidium caldarium
  Clone ID: LIB190-018-Q1-E1-A8
ccacgcgtccggaggacaagcaggcgactccttgtgtggtttacgaaaagcatcttatgagaaaagataataggaaagaaaccaaccaaacaatgtttgtggtggtatcgaaggatagtttttattgcccatgtggtagaaaaagttttgtatctctaggaaataaaaagtttttatttgcacggcgtgtattacgagaaagaagttggtggaggatggtttccaaagactcggtacaaccaccatcaacaccttctttggcaatagagaaagaagaagatatggtggcgttgaagaaacaaagaatgaacaagatagaagatttattttcagcgggtttcacgccttttgcctatcgatggaacaagacacacagtgcattgcaattacaaacaacgtacgagtacttgtctccaggcgaacaagataccctggtagaaatatcttttgctggt

SEQ ID NO: 919 - DNA, 356 bp, Cyanidium caldarium
  Clone ID: LIB190-018-Q1-E1-A9
acccacgcgtcaatgtgggttgtggagtatgtgcgcttggcaacaaactaaaacatggcaagaagaatcatcggagcttatatgtctgacgctactgtagcgtctctatttagcatggggatgttgttctaccttacaatagttgcgggctctatcactattgtgggtcttatgggtaagagttccgacggtatttgggttcacagtgttccagcgaaagatgaatattgtgcacacaagtcttcccttcaagtaaactaccactgcatagcttcttattgcaagtatatcatggctgtatcttttattggtttggttatcagcttcttcgagttttggtatgcattcctccgaat

SEQ ID NO: 920 - DNA, 378 bp, Cyanidium caldarium
  Clone ID: LIB190-018-Q1-E1-B10
acccacgcgtcagcggacgcgtgggggtttattgcgacgccaaactgtctggaaagcacttaaacccttgtaccacggtggaacactaggtgaaatacaaaacggggtattttgcaaggataatatttataataaaacacaaggtggtggtccaaagccttctgtaactgggaaaccaggaaaacttgatttctcaaagggaggctccgaagccggtcaggcacaaaaagaaggcaaaggaggagtggctgtaaaagtgaaacctaagcgtaaaaccaaaaaggagaaaaaagaagaactttattatatttggcgagttttgttgcacaatgacgatattcacacttttgactatgtgataactgctaacgtaaacct

SEQ ID NO: 921 - DNA, 362 bp, Cyanidium caldarium
  unsure at all n locations
  Clone ID: LIB190-018-Q1-E1-B11
acccaagcgtcaagagtttcttnggttcgactccaaactagtaagcttaaagagactggttttgtacatagtcgagcatggctgggatcacttcanagttgctcctggattttattggacagctccggtgttacagtctttgataattgtaggatcggggaaatctaagcaagatgctggtgcagtgacacaagcaaataaacattcaacaatcgaagcgaaggtcatgcaaacaaaaagcaaaaacatgaaggcagtttcttcgttagttggctcagtacgacaaggcgagtttgattggttggaatttttgtttacatattgtaacctgacggagtttgaagctcgtgaatgtagtgata

SEQ ID NO: 922 - DNA, 439 bp, Cyanidium caldarium
  Clone ID: LIB190-018-Q1-E1-B6
ccacgcgtccgaaagcagccagcggaagagtcatgttggtgtgtttagtaccgaacaatgtctatggttatccctgtaaaaggcacaaaatatcgctatatcgctctccgaatagcacaagaaatggctttttcaacgatgacacgagtagttggaggaggcgttttacctacagacgtcatacagacacaaggaccttatggaaatcagttgatactcattctgtaagaatgacgagcgaacctgacaaaggacaggagtcatcttgcaacggagaagacattttgcagtccattctgaaacgtaaggaagtggaagttgctcttttataggagaagctttccagtgaatccagtgagaatccaattgtgaaacgcttagccatggacggttcttttgaaccaaaaaatacttttaatccgctctgaaaaaacccaac

SEQ ID NO: 923 - DNA, 362 bp, Cyanidium caldarium
  Clone ID: LIB190-018-Q1-E1-B7
ccacgcgaccggagaaaagaagagagtgtaaggcggcgtcataataaaaatccgaaaggagtagaagaaaagagagagaagaaagaaaagaagagaaaagccgtactgaagaccgacacaggtacgcgaggagaaaggagacccaaattaaggtgagaggggggacgataaggaactaggcaaaaggatatggtatctgcggtagaacatatgaaagaagcagcaccgactgtttagcaaaaacacagcactctgcagaaaagagaaaatgtaaagtatacagtgtgcggcctgccaaatagtagagaagaaatcgatgaaagttttttttagtaaaagatgaggtatagagaatggcgggt

SEQ ID NO: 924 - DNA, 344 bp, Cyanidium caldarium
  Clone ID: LIB190-018-Q1-E1-B8
ccacgcgaccgcaaacgcgtccgagaatgcactcgaccaaaatgtgaacaagtcgaatgaaatattatgttctttatggaacaaaggttattctgcgttggatatagtacaaacgctttttcgtagggctcgtagtcacgagatggatgagcagttggggtcttcaagtcatgaaagctgttgggaagacgcatatgaaagtaatggaaggctgtttcagtttaataacattgactgcgttgacaggcattctttcccgcgcaactgagtccacgattaattgaacaaccaaaaaaagcaccagtaccattaagcaatactattttttttttttatcatactgt

SEQ ID NO: 925 - DNA, 349 bp, Cyanidium caldarium
  Clone ID: LIB190-018-Q1-E1-B9
acccaagcgtcagcccacgcgtccgcccacgcgtcagcccacacagtccgtgcatttcttttctatcctcgccctcgggatatttggttatttcgacgttcaagcgtgcgagtttgtgggagcgtacacagctcgatagaaagggcaggggttatctaagaaacttttcaacagcacttgcatatcgctttgttcatatgagcagtccacaagactcagctagtatgaataacttcaatattgctctttgtcaaatcctagccacggataataaggaggcaaatataccaaaagccgtttttgtctttttataaagctgctacaacgggagccaaacttgttgttcccc

SEQ ID NO: 926 - DNA, 371 bp, Cyanidium caldarium
  Clone ID: LIB190-018-Q1-E1-C1
agcaaacctcaagtggatcattccacgttggaaaagatagacttgtctcaaggcagctttaaagtactccaagactgtgacaaagatttagaatgtgatcataataggagagtttcagttggaacttattcagtatgggcgcttttcacctggtttttggacgagagaaaatgttctgctcttctatttggagctcgtgtcaggtgtattcataagggacactctctaccttttctacaacaaaggtgaagaacatttgtttgcgagtttaatgctgttgttggagacacaattctcactgtatgcagacataaaaacaaactgggagaaacgacactttatcgttggcctcatcgtcatgtctttgtgtg

SEQ ID NO: 927 - DNA, 352 bp, Cyanidium caldarium
  Clone ID: LIB190-018-Q1-E1-C10
acccaagcgtcagcgttattaaaagatgatgtgttggtgaatagaacaagagtttacaagtcataaaataaatcgagttggtggcacaagttggaaacaacgtgtatatttcggatttggtatcgttgttttatggttgtttgtattgggttggcctattctggtactcgtatggagtgctatacttgtaggtcgacaacacgtttattgcgatgaaaacttggcagatttggtaatggtttccgctggactttggttgttattgggtttctattctttggttcttttctttttcatgtttttatgtggagacattccacaccctagtgtagtgagtagtataggatttctt

SEQ ID NO: 928 - DNA, 346 bp, Cyanidium caldarium
  Clone ID: LIB190-018-Q1-E1-C11
acccaagcgtcagaagctcttccttatattctttgtgcttggaaaatggttgcaaagactgctctgagttgcctctttctctctttccttatcgctgccgcagttgcagccgacgtgggttcagaggagagatggggatatggtcaggggacccaacaacagcaacagtgccaacaagtatgtaaacagtatgcatactatcagagtccagtctgcacttccgtaaccacacagagcccatactggacccaatgctcgaagactgtgcaaacctttgtcccaagccagtgcagtacttatattttttctcctacatggacctattgcagcacctacaccaccacta

SEQ ID NO: 929 - DNA, 241 bp, Cyanidium caldarium
  Clone ID: LIB190-018-Q1-E1-C12
acccaagcgtcagcccacgcgtccgcccacgcgtccgcacaagacacgcaggtttatacggtggagcacgttgcaaagcaccacacacgtaatgacttgtggattatcaaacgaggcagggttaaagaattttcctcccttttagaaaggcaaccttgtggcgaacaaatacctttacaataatcaagttaacaacggaaccttgaatttgacaaggcaaggcacccaaaacaaacccaat

SEQ ID NO: 930 - DNA, 340 bp, Cyanidium caldarium
  Clone ID: LIB190-018-Q1-E1-C3
aggtggagccttgaggatgaatcaagtgattactaagttgtgtgaaggaaataaaatatttgaatgaaacagtcgttccagttcaactttcagccaacaacgaatgggaataataacagtcatagccataatcttagggtggaacaaaacatcaaagacttgaatattgtacctagcgacagcttattcgacgtggatacttgttatgattccgaaaaggttgttatccacgattgccttactttatggaagagaaaatcgtccaaccttgtcagcaaatattttggagttgatcatgatgttataaggggtgtgtatgaaggtggcttcaagctttggg

SEQ ID NO: 931 - DNA, 327 bp, Cyanidium caldarium
  Clone ID: LIB190-018-Q1-E1-C5
cacgcgatccgaatgacttcagcgaccacttgaacgccttatcaaaaaatactcttcgcaccctcatgaatacatccacgacaagagtcataaacttccttccgtcggagcgtgtgatgcagggggagcttcctgccgccgtcactaaaatagtagggggactgatcatgtcatacacactcatccacaggacattcccattgtaccagggttaaacacatcaccctgacagttttccgcctaacgatcatattctagcattactcactactcacatccccactctacttcatgctctattcaaaccatacatgttccttttttttt

SEQ ID NO: 932 - DNA, 188 bp, Cyanidium caldarium
  Clone ID: LIB190-018-Q1-E1-C6
acgcgtacgatagaaatgtattcctcatctcgtggccaaacataaaacaaagtgtttaagtattccaactatcggtataggagctggaaaatatacttcacgacaagttttagtatatcacgatgggattggaatgttacaacatccacatcatgcgggagttaccccaaagttttgcaagaaatatg

SEQ ID NO: 933 - DNA, 408 bp, Cyanidium caldarium
  Clone ID: LIB190-018-Q1-E1-C7
cacgcgtaccgaagtatttgcatctttttggactttggatttgcaagtatgggtgtgctcattcagaactgcttctcagttagttacgcaatatgcctagtcataaggaacaaaataaaggaagtggaatatcagctgacggttacgcactaaagtggagcggtattcggttggacgtatacagcagtttggtcactatggtggacgcagacgacctcagagccctcatgtttaaggaaagcctcaaggaaaagtcaaagctgcatgacccaaaatttttcaaaatctattatgacgagaataaggactacttttactatttttttctttttgataataaaatgtttctttctctggaagttgcaccagaatatcctactctggtgggaaactcgtttctgcagaaat

SEQ ID NO: 934 - DNA, 318 bp, Cyanidium caldarium
  Clone ID: LIB190-018-Q1-E1-C8
ccacgcgtccggatggtgaccattgttcttgaggatgcccgacaaaagagttgttctccgtcgaagacacccttataatacaagaagtaatcgaatcaaaaaagtgagaactcccggagggagacgggttgttcaatatccgggcaaaaagggaaagggtcctagatgcggagacactgggaaacccttgcaaggaattccagctttgagaccgatagagtatagtagaatatccaaacgtcaaaagacagtcaatccagcttacgggggcaatttatgtgccaaagcagttcgagaacggattcttcgtgcgttttt

SEQ ID NO: 935 - DNA, 276 bp, Cyanidium caldarium
  Clone ID: LIB190-018-Q1-E1-C9
cacacgtccgggatgaactaggcaactaaaaaaaagcactaaactaacaaagacaaaggaaaaaactgagtatcacgaacaaaagagggactacatgaggaaaggggcatcaaggaactataagtacgagaagggggaatgtcaatgaaagcacgaaactattttaagaacacagtgtaaaacgcgtaccttttccataatgtcctaccgactcaaagaggaagcacaaagacacacacagaactatccacgtaagaccctaagccacttcatctt

SEQ ID NO: 936 - DNA, 359 bp, Cyanidium caldarium
  Clone ID: LIB190-018-Q1-E1-D10
acccaagcgtcagggttttgtttgacatgatttcgaagctgaaaaaaaaagctcgagcaccaacagagcaagaagtggagcaggaagcaaaagacaggatctatcgacgctaggaacagggtgagctggtgcgatatatgtggggttcgcctgtgaaaccaccaaactggtggaagtcggatgcctttcaagaaaattataagcaattgtgtcacagacataagcagcgcctcaagacccctgcagagcgaacgctataagatatggaagaaatgtaaagacctagtagcctttggtacttttttgtagtagtaacaatggtgttgcaaccagttggagtttccttgttctatgagcac

SEQ ID NO: 937 - DNA, 347 bp, Cyanidium caldarium
  Clone ID: LIB190-018-Q1-E1-D11
acccaagcgtcaggcaatacccaatgcggttctttccaagttaaaaaaccacaaagatttgggtgttcatacggaaatgtttagtgatggcctcatagatttggtggaatgtggggcagttaccaattcgaagaaagctattaatccggggcgcattgtttcaggttttttattgggcaccaggaaactgtacgattttgtcgatcgcaatccactcatcacgatgcacgatattgcatttacgaacaatccagtcgttatcgccaaaaattccaaggtgacagctatcaattctgctattgatttggacctcacaggtcaagtacttagcgatagcattggaacca

SEQ ID NO: 938 - DNA, 454 bp, Cyanidium caldarium
  Clone ID: LIB190-018-Q1-E1-D7
ccacgcgaccggagtgttgctgttgcaaggaggaggaggagctatgatgagttctcagacgattgtattctcgattctcgttggtgtattatttggtgccttgtcctatattggatatcatcggggaaagaaaccgagtggtcctctagaccccgtggagatacagagagtttccgctcgtcgaaaagacagttgtttcgcacaacacccgaaagtttcggtttgcacttcccaactcggaagcaacgctcaacttgcctctgggaaagcacgtctatgtaaaggcaatcgtagataacaaggaagtatccagactctaaacttttatctctcccaaagaaaccaaaggatattttgagctcttgatcaaggtttatccagcaccttttgggaccatgttcacgtacctggattccttaaagtgtggggacacggtcctccttcgcgggccaaa

SEQ ID NO: 939 - DNA, 322 bp, Cyanidium caldarium
  Clone ID: LIB190-018-Q1-E1-D8
ccacgcgaccgtaagagggttggtcatttgttgagctgaagagtcaatgaacaagcttcagttgctatacgtaaccaaacaagctgtttcaaaagcatggcaaagagaacagaaaaggttagactgggagaagaaatcatttgcagaaggaactttgggagagcaagtggaatgaaagacaaactgcacaagagagcgcgtactttaatcctgaagatgagcacgcagtacaaaggttagcaacgaaacttcggcagcaaattgagccatccgaggaagtactcccccaacaaagaaaaagcgtggcaaaaatcctacaaaa

SEQ ID NO: 940 - DNA, 343 bp, Cyanidium caldarium
  Clone ID: LIB190-018-Q1-E1-D9
acccaagcgtcagtgggaaagagaggaattggaaggcgattgaatgccgaaagagcctacacacacaaaagtgttttgttgtataggtaaccaattcttcttgctccatgtcgaaacgggaaacagctaccgttcgttctgcagtagcggggattttaaaagagtcacaagagaagaaacgcaactttgtggagaccgtggaactccagataggactcaagaactacgataccaaaaaggataagcgttttagtggttccattaagcttccatatattccaaaacctaaaatacaagttgcatttttatgagacgcaattcacgtacaacaagcacaggaact

SEQ ID NO: 941 - DNA, 356 bp, Cyanidium caldarium
  Clone ID: LIB190-018-Q1-E1-E12
acccaagcgtcagcccacgcgtccgacggaaacgatgttattagtatcgatattttgggcatattatcacagtagtttgagtccatcagtagagttaggaggagtatggcctccaagggggataagggtgatagaggtatgggagttgcgaatgttgaatacgttgttgttgttattgagtggagtaacagtgacatggagtcatgagagtatgaggagtggagagaaggaggagatggagaagggtttgatgataacgataatgttggggataatatttttgatgatacaaggatatgaatattatgaatcacagtttaggataacggatggagtatatgggagtagcgaaacaa

SEQ ID NO: 942 - DNA, 376 bp, Cyanidium caldarium
  Clone ID: LIB190-018-Q1-E1-E2
agcggacgcgtgggttattgagtaatgttttaagggttagtagggatatagataggattgtaaagagggaaattcctgtaagaaaagtacttggtgccttgtatgcggctatccaatcacactttaaccggacacgtggcacacaagcagtggacaacaacttgaaagaaagtcctgccacttacaatctgtccttgcgtccggatagtaatggtttgggtcctaaaaggttttataaacaagttgacgtagtggaaagaatacctaacttgcactgtgtctccttggacgggaaactgcttcgaacgagaacaggaaagtttctggaaagtcgctgtcgagagctgtccctagtggtagctagtgagttggaaac

SEQ ID NO: 943 - DNA, 319 bp, Cyanidium caldarium
  Clone ID: LIB190-018-Q1-E1-E5
ccacgcgtccggatgactagacccagtctgttgttgcaatgaaactcattctgtatactctgtttgtgttgtctactgtaatactgacaaccagagctcaacctatgactcctcctactcctccggctttgaacgactggaagcaacagctagaggaggggattccaagacaatataaacgctctgtgcaaggaatttttgacaatattaatcgaccaggcacagcaaagggctgtattgtagcagcagattcaaagaaacaaccggactattattataactggattccagatgcagcaataactatgcaagtaattgt

SEQ ID NO: 944 - DNA, 379 bp, Cyanidium caldarium
  Clone ID: LIB190-018-Q1-E1-E6
ccacgcgtccggagctcttccttatattctttgtgcttggacaatgagttgcaaagactgctctgagttgcctctttctctctttccttatcgctgccgcagttgcagccgacgtagtttcagaggagagatggggatatgctcagcaaacccagggggagcaacagtgccaacaagtatgtaaacagtatgcatactatcagagtccagtctgcacttccgtaaccacacagagcccatactggacccaatgctcgaagactgtgcaaacctttgtcccaagccagtgcagtacttatacccaatctcctacatggaactatttttttacctacaccaccactatcgtaccatctcaatgcaacaaggccgtgaccac

SEQ ID NO: 945 - DNA, 322 bp, Cyanidium caldarium
  Clone ID: LIB190-018-Q1-E1-E7
ccacgcgtccgaaaagctcagcttgaagaacaaagaacttgcgtggagttggacgttatttatgaacttggactctattgacacaggaattaatgctccttttgacccgtttgcaaactcctcacgtggagaggacgcatcagtaaccaaaaatatggggcatattcgcttgcaacaaagaaacggccgcaagtgcttgacgacgattcaagggcttgacacaaaattggatttgaataaaattacaaaggccttcaaaaaggagttttgttgcaacggttgtgtcctagaccacgcagaactgggaagaatcatccaactt

SEQ ID NO: 946 - DNA, 391 bp, Cyanidium caldarium
  Clone ID: LIB190-018-Q1-E1-E8
ccacgcgaccgcacacgcgtccgttccacgtggggaaatgcaattaaaacagttgctatcttcctcacaacgcgaggacgactatgcacgtacttttgacaacaaccatgtttctggatactgggaggaaaaacaaacttctcacaacttaattgaggggtcaccttccgaaacggaacaagttacgggtgaagaaaccaacgcccccgtccatggtggtcaacaacaacatcaacaacaaaacgccaaaagaaagtcaaaacgtactatttaaacgaaaataagacatgaccgaactcaacctggaagacttgtttgtccttttttttttgtttccaaaccaaaaaacaatcttttgacgaatgctgacctgttatacagtacgaccccg

SEQ ID NO: 947 - DNA, 382 bp, Cyanidium caldarium
  Clone ID: LIB190-018-Q1-E1-F2
agcgcagctgttgcttccatcaagacgaagcgtactattcaatttgtagactggtgtccaactggattcaagtgcggtatcaactatcaagctccatctgtgatcccggactcagaattggctaaagttcaacgtgcggtttgcatgatttccaacagcactgccatctctgaagtctttgccagaattgatcacaagtttgatcttatgtacgcaaagagagcatttgttcattggtacgttggagaaggtatggaagaaggtgaattttccgaagcacgtgaggatcttgccgctctcgaaaaggattatgaggaagtcggcatggattctaacgatgctgaaggcgatgaagagttttaatgctctgcaaaaatccctt

SEQ ID NO: 948 - DNA, 209 bp, Cyanidium caldarium
  Clone ID: LIB190-018-Q1-E1-F7
cacgcgaccgcaatcgcgtccgcttcccgccgcccttttactttaaaaaaactctgttaccttaactctgactacgacgttcctatctggatcaaagcaagtccacctgcgaccgaatattttcgggacacaagtactccacaaggggaaagaggagccttggtgacgattatttccaacggatcaaggttccctgacgatgttacctt

SEQ ID NO: 949 - DNA, 368 bp, Cyanidium caldarium
  Clone ID: LIB190-018-Q1-E1-G10
cgtcaggttattgatgcttgtactgtcttgttaacaagcaaaggagacgctgttctttccacgcaaacgattcagaaagagttgggacgattcggagatattgagcaaatggtattatctcaagatgaaagacaggcgttgggaaaatattccatcgatgatgctgcagtgaactgtcttggagttgtgaatttaccagaggaagccgttgcttgtgtatttactgttcgtatggctaagcctcaagacgcgagtttattttgtgctgtggaagaacattgtgccgactattttttgtttaagtagtcacatagaagatagttttgtggattcctgtcatcgaccgttgatagtttatgacgaatttt

SEQ ID NO: 950 - DNA, 346 bp, Cyanidium caldarium
  Clone ID: LIB190-018-Q1-E1-G11
acccaagcgtcaggttggtaacggatgaacctggttattatgaaaacggtgcttttggtattcgaatagaaaatgtattgttggttaagaaagtggaaacaccgaatcaatttggaggagagccttattatggtttcgaacaggttaggtgttgttcctatggaaagtagattgatggacttgagtttattgacagatgaagaagtgacttggatcaatagctatcatgaagaatgttggaacaaagtttcacctctgttgaaagaggaaatggcagtccattggctgaaagaaagaactattttctattagtgaacaaataaatgttgtttctatttttagtaac

SEQ ID NO: 951 - DNA, 407 bp, Cyanidium caldarium
  Clone ID: LIB190-018-Q1-E1-G5
cccacgcgaccgcaagtccactgaacaattattgaatttatatgaagacttggcaaagaagtttcctattgtttcctttgaagatcctttccatgaagaagactttgatggctttgcaaagatgaggggagtgttgggaaaggactatcaaatcgtgggcgatgacttgttggtcacgaaccctactcgaataaagaaagccattgatgctggtgcttgtaacgctctcttattgaagttgaatcagattggcaccttaacagaatcgatagaagcgaatgacatgagtcgagcaaccaaatggggagttatggtttctcatctgtctggagaaacagaagattcctttattgcagatttggttgttggtttggaaactggacagattaagtcgggagctcatgccg

SEQ ID NO: 952 - DNA, 419 bp, Cyanidium caldarium
  Clone ID: LIB190-018-Q1-E1-G6
cccacgcgaccggaggttttcccgtccttttcgtatccttctgttaaagtatctcgtcaactgttttcaggttttggtcttgcaacaatggctgctgcaaacacaaaggaactagaaaccaaggtgagggacaggctggtgcaactttacaagcagaggccttgtatgccaataatggtaagaatagcttggcacgacgcgggaacatatgatgtgaataccaacactgggggagtaaacggatcagttcgttttgacgttgaacagaagcataaagccaacgctggtctcaaagttgctttggatttattggctcccatcattttttgactttcctgagatcagttatgctgacctattccaattaccaagtgtactacccatcgagtatgcacgaggtcccacgattccattccgca

SEQ ID NO: 953 - DNA, 332 bp, Cyanidium caldarium
  Clone ID: LIB190-018-Q1-E1-G7
ccacgcgaccgaagggagacacttccgcagcgctttccgcttattgagcagctgcaggaattccttcgattgtgtttttacccgcggataagatttcggttgctcaactcgtccaacctattgcgggtggcagcgtagtgttgtcgttggacactgaggttgatggatgcatgaaagtcgttcaacaagtcacgagcgagtttcctatctatttggcgaattctatgaattccttgagattagagggccagaagacggtggctatcgaaattgcacagcagtttgattggcaagtttcttgattgggtagtagttcctggtgttttttttgg

SEQ ID NO: 954 - DNA, 432 bp, Cyanidium caldarium
  Clone ID: LIB190-018-Q1-E1-G8
cacgcgaccggactttagacaattgccaccggaaggagaacgcttacaacagtggagagcagaacaacccgaaagaatagagcgaaagaggagagaagaggaaagtaaaagggaggaaattcgtggagctgcttccaagtatatttctgagttttgggggaaaagagctcaagatgtgaacagaagaaaggaagagaatcgagcaaaagataaagattgttacaaggaccaatttgttgacaaggaggacgaggtggaacctgccgaggcttttgactatgttttgggaggaaaaggcccgcgtttgtccgcacgaacggattctttttatgatacaagctctggtagaaccaggacgcagaaagaattgaagagaatgcgagagtcgatgcaaagctataaacaacacgtggttggtgaataagagacacc

SEQ ID NO: 955 - DNA, 355 bp, Cyanidium caldarium
  Clone ID: LIB190-018-Q1-E1-G9
acccaagcgtcaaagagaagaaagaaaagaagagaaaagccgtactgaagaccgacacaggtactcgaggagaaaggagacccaaattaaggtgagagaatggacgataaggaggtatggagaaaggatatggtatctgcggtagagcataggaaagaagcagcaccgactgtttagcaaaaacacagcactctgcagaaaagagaaaatgtaaagtatagagtgtgcggcctgccaaatagtacagaagaaatcgatgaaagtgaaagcgagtaaaacatgaggtatacagaatggcggtcctattattatggatccaaaggtagcgaagtaaatagacgtttgaaaggcgtcc

SEQ ID NO: 956 - DNA, 428 bp, Cyanidium caldarium
  Clone ID: LIB190-018-Q1-E1-H11
ccacgcgtccgtgtgtccgaaattatttccaaaaataaataaatggatcatgttctttattgaaaaaaacaaaaacacacaaaaccaaaaaaaaaaaagggacccggaccaccaaacaaccaccaacacagggcacggggaccccccctcaaacaccccccccacaccccctccccctccatcaccccacctctctccctccctcccctcccccctatctccctcctccccctccttctctccccccttcctcccccctccccccctcccccccccacccccacctccccccccccccctttttttttttttttctcccccccccccctcccctcccccacccttccccccctccccccctccctattccccccccccccccctcccctcctcatctcctcccccccctctctccccccctccccccc

SEQ ID NO: 957 - DNA, 456 bp, Cyanidium caldarium
  Clone ID: LIB190-018-Q1-E1-H5
cccacgcgaccggagaaataagatgaggatggatgtcgaccaagagacgacaagtggaaagcgttggaagcacgataagtttcaagctagtggtggtggtagtgctcgaaggagtcaagtaactcgtgtccaagtcaccaacttggcactcggtgtgaggaacaaggatatcaacgtaagcttgtctctttattcattttttgtggctctttggagggtgttgttgttatttaccattgtatactggaaaattgtttgtttccggaatatttcgttgtacttcgactgcttacatcaccctcctccttctccgcctctttggtatgcatgacgttttcgttcctcaccttttgtttcaggacctcttttctgaaattggaaagttgcgccaggcctttgtaaagtttgacagaaacgtcgttctacgggcagtgcagaagttgttttcaacgaccg

SEQ ID NO: 958 - DNA, 388 bp, Cyanidium caldarium
  Clone ID: LIB190-018-Q1-E1-H6
ccacgcgaccgtagagaatggaccgtgcaagggacaacttgaaccacatttaccaagtgataaacgcttatgcttcaaaacaagactatccacttgtacaacttgtcattgctcttttccagtctggacaccttcgttcctcggtaatcaacttttaggacccaaagttggctagagctttggtatacataaccctagctcccataatatggaacatattggctaggttggagtatttcttccacatcatcagtttcctgtttcgtggaaaaagaacaggatgctacgctttggcgctatggatcgtactctttagcctatatttttacgttttggtgatggaagctattcaggcacagcctactctcaagctcttggaacacaccca

SEQ ID NO: 959 - DNA, 384 bp, Cyanidium caldarium
  Clone ID: LIB190-018-Q1-E1-H8
ccacgcgtccgccaacgcgtccgcgggaacagacagctaccttcttgatgaacagctgttcttaggaaactcttctgagtgaagtcaagttcttcttcctcgtctaacgttcgtattggagggctgggacgttcctggctgaaaggcttctccgtagggctaactttcttcagcaacgtcatttcaccttataaattctttacctttggctcttcttggggtgaactgctagtgtccttttgatcctcctcaccgtaacggctgttctggatcgaagagttctccacactactactattgtctctgtgggttaaacagtcttatttatcttgcagtatatacctgctgcttggtttcagtaaatcatcatccacagtttctttc

SEQ ID NO: 960 - DNA, 423 bp, Cyanidium caldarium
  Clone ID: LIB190-019-Q1-E1-A10
cccaagcgtccggggcgtcgtcgactaggcggtgtgaagaataaatatgggaagaagaccggcaaggtgttatcgttatatcaagaacaaaccataccccaagtctcgtttctgtcgtggtgtcccagaccccaaaatacgaatttatgacttgggtaaaaagaaggcaggggttgaagagtttcccctttgtgtgcatttgatttccgacgaaaaccagcaaatatcttcagaagcgctggaagctgctcgggttgcttgcaacaagtacatgacaaagcatgcagggaaggatacttttcacataagagttcgcgcccatcctttccacgtcattcgaattaataaaatgttgtcgtgtgctggagcagataggttacaaactggtatgcgtggtgcgtatgggaagccgcaaggaacggt

SEQ ID NO: 961 - DNA, 446 bp, Cyanidium caldarium
  Clone ID: LIB190-019-Q1-E1-A11
gatagggtttgtgtgggtgcgtcgtcgtcaaggaagggagagtaaaagaagatggtttccctcaagttacagaaaagactagcagcttccgttctccattgtgggaaaagaaaagtatggttggatcccaatgagacgagtgaaatatccatggccaactcacgtacgtatccttgtgttgtttttaccctttggtgaactgtgtccaaattatgataggtcagaacattcgaaaactagtaaaggacggattcgtcatacgcaaaccagtaacggtacactccagggcaaggtttcgtgttcgattagaggcaaaacgaaagggtcgacatagaggaccgggaaagcgcaaaggtactatgaacgcacgtctgccgcaaaaaaccgtgtggattcacagaatccgagttcttcgcagactcttgaagaaatacagagaccagaac

SEQ ID NO: 962 - DNA, 424 bp, Cyanidium caldarium
  Clone ID: LIB190-019-Q1-E1-A2
cacagctcaacctatggaccctcccactcctccctcctttgaacacgtgaagcaacagctaaaggaatggattccaggacaatatacacgctctgtgcaaggaatttttgacaatattaatcgaccaggcacagcatagggctgtattgtaacagcagattcaaagaagcaaccggactattattagaactggattctagatgcagcaataactatgcaagtaattgtaagcatgtatgagagggcaacagatcccaaagagatcgatagactggagactattatcaaggaatacatagcgtttaatcacaaactacaacatactccagactacaatggcaacttttatacagatggtttaagtgctgctcattttcgagtacatggagatgcatatcctggaggatggtgcattgaaaatgat

SEQ ID NO: 963 - DNA, 421 bp, Cyanidium caldarium
  Clone ID: LIB190-019-Q1-E1-A5
aggtcgcaaaccaacttatcctgttggcaagatgttggcttatcgtcgcgaaaaaacattatttgtttcctcgtttacaccttgttctcacgccaaatttctgtcaagtataagaagaacgaacctttcaatttgtaggaaaacaaccagcaaggagtgtggttacgtgttacgcatgggcgcagataacttgaagttttggaaagatttttgggctggtggctttcctggaggagaagcttatttgaaggaggtgatagagagtaactttcaaaagccagttccaggactcgatactagtggagtaacgggacaaggggaagaaaagaaagcagttggcaaccgaacacagcagcctgccaaagcttcttcgggaaaagactccaaccctccttcttccaataatggcactgccaacttg

SEQ ID NO: 964 - DNA, 420 bp, Cyanidium caldarium
  unsure at all n locations
  Clone ID: LIB190-019-Q1-E1-A7
agatagaactcatgaatgagagaccttcgcctgcagagagccctaacagggataatattgtacatgcaaaggttgcagcgagtccgcagcctaatgaaggcgatcccggatatagcagtgtaagaacagatcgcagagatacggaagacaagtctaaacacacgcagaatgaaagccacaacggattcgattctgcctcacacgagaaaaagcattcttcaagacgttccttgagctcctttttgatggagaaacttacaaaaattgccgggccgaaacaagcgaatctcgggaaggagaataagttttattatgatgagaaactacgtacatgggtctgtgacgatggagatgagagcaacgaagaagttcaacnnacacgcactctagaacctcagatggttcgcaacattcttcgca

SEQ ID NO: 965 - DNA, 414 bp, Cyanidium caldarium
  Clone ID: LIB190-019-Q1-E1-A8
ggttcttcgaagaaagaaacggatgacgtggacagcgatagtgacatagactcggagtggagtgacttggaagataatgagaccagttgtcccgagcaagttggtgcggttgctggttcttctgtcgtgaaaagcggcatttttgtgtagagagtgtgtacagaggtttcataccagccgtgtctatttgtggtgtgttggtgtacatagctgtctatgttttggtgctgtgttggtcttactttttgctttgtgtgttccgaacaagttttatcgttgctggcagtatatatcttcatcgatggatgtatatatcccaaattttgtttcgcttaaatactgtgcatcgatatacttggttcgtatgattggatatagttgctttgttttgctacaaaatacggagagaataaa

SEQ ID NO: 966 - DNA, 420 bp, Cyanidium caldarium
  unsure at all n locations
  Clone ID: LIB190-019-Q1-E1-B1
cccaagcgtccgattgaatgggaacttgttctattcatcatggttgctgcaccttggcggcaacaaagcaaaggggcacagaacaagaatttttgctattccagaaacaagaatagaaactgcgcgactgtgtttggatcataagggtcatatctttcgtagctcggtcgaaagccaggttctggttgtcgcctaaaaaagcgttttcgtgctaaaagcacaacaagccagtcgtctggtgcttgctggacgaccgcagactgcacagtccaaagttttaatacgactatttcgtgaaacgattttgccaaattttttgtgaaaagcctctagacgactagagccgttgaatcacgaagcctctgcttcagagtggcatctttcattgagcccactatangactctcccaacagaagcca

SEQ ID NO: 967 - DNA, 435 bp, Cyanidium caldarium
  unsure at all n locations
  Clone ID: LIB190-019-Q1-E1-B10
cccacgcgtccggaaagaggaaaggtttacgagagaaggaagtagaaagaagagagtgtaaggcggcgtcataatagaaatccgaaaggagtagaagaaaagagagagaagaaagaaaagaagagaaaagccgtactgaagaccgacacaggtactcgaggagaaaggagacccaaattaaggtgagagaatggacgataaggaactaggcaaaaggatatggtatctgcggtagaacatatgaaagaagcagcaccgactgtttagcaaaaacacagcactctgcagaaaagagaaaatgtaaagtatagagtgtgcggcctgccaaatagtagagaagaaatcgatgaaagtgaaagcgagtaaaagatgaggtatagagaatggcggtcctaacggtaaggatccaaaggtancgaagtaaatagacgtttg

SEQ ID NO: 968 - DNA, 451 bp, Cyanidium caldarium
  Clone ID: LIB190-019-Q1-E1-B11
caaaacttgttcgcggtttcaacttttacaagctgcttttgacaaggcggtttccaagtttctagaaaacggctgttcttactctaagttttccgagttcttccagcccgttgcctctgtttatccagaggaatttgagctgttgcataaacaactccaacaactcttagatataagactaaagcaagaatttcagttattgctcgaagataaagatattgcaactaaactcgaggtttgcgaccaactcttccaaacgtatcatgtggatagaaacggttatgtgagaatacctttgaatgaacaaactccatccgaatggatcaaagctgtagcagtaaaacaaaaacacaaatggaaagaaacactctgtgaggaacgggatgagttgctcaaggctgtcaaagacctcgaatgtaaagtatccgacacgcgacaaaaaggcgacaaa

SEQ ID NO: 969 - DNA, 438 bp, Cyanidium caldarium
  Clone ID: LIB190-019-Q1-E1-B12
gtgggatggtcgattgttgctattgccttgttaggaataccttgggcttcgacgattactgaaataagattccttgggctatcctatctcgcagtttgagagcgcacgtacccgaaaggatgggaatgtattctactctattcaatgccagtcaatgttttccagaaattttggtttctattgttgcagagaaattattggctcgtttaagtagacaaacgacgatattggctatgggaggtgtgatggcatggttaggttcctcgtggatatttacgttgtaatatcagccatcgctattctctttttccatatccaaaagtaacataatacgctttctatctccaatgcgacgtattcccatatctttcaggtcttgttccgtcatatgagataagacttggccatcaatggcatgatcaagaaatagctgagaat

SEQ ID NO: 970 - DNA, 415 bp, Cyanidium caldarium
  Clone ID: LIB190-019-Q1-E1-B5
cccacgcgtccggtcgtgcaacgttgattttgttgtttcttcaacatagccttgtgcaaagtgtgtctggtaaacggatacaaactcacaaaaggctgagtttccagtgtataaaaccttttcaaaagcagtgttttctcagtaatcttattgataaaggaaaaaactctactcgtcgttttacgttgaggcagtttggaagcatgagtgagacggtgtcccgtgttcgtcagttgacagagaaaggtgccaaggtggaaggctggaatgactgttggaaggcaggcttgacaccttgggataggggttcttcattacctattctatgtgaactttgcaaggaagatgcgtttcctaagggatatgctttggttccaggctgtggccgtggctatgacgttttgactcttgcctc

SEQ ID NO: 971 - DNA, 355 bp, Cyanidium caldarium
  Clone ID: LIB190-019-Q1-E1-B6
gcatgttatgcactttgttgtaaagcaaaactggttcaagtaatagaaatatgtagacacggggatcgttcgccactgaacacttatcccaacgatccaaaaccttaccatctctggccaggaggccctggacagttgacagctgaaggaatgagagctcatttcgaacttggaaggcaacttcgccgacgatacgtagattcagggtttcttgaccaaaatctgtccgtcaacgaggtagcttcagctccttgcggtgaagccgtcccatctgatatttttatggttgctataggttaaagttgtatccagcgataccgatcgtactctcatgagtgcttattgtcagatggct

SEQ ID NO: 972 - DNA, 426 bp, Cyanidium caldarium
  Clone ID: LIB190-019-Q1-E1-B8
agcggagatgtcttcgagagtaaaggcagataccacggaggcaagctcagagttaaaaatagttcttaaaagctctgatatggaacaatcaaagctggaaaagacttttcagatagccaaagaggctgtttccaggttcaagttggagaaggatattgctgcatttattaaaaaagagctggacaaaaactttgatgtatactggcactgcgttgtcggaaagagcttcggttcatacgtgactcatgttagtggcgcattcgcctacttctacgtggataagcttgcagtgatggttttcaaagcatagcatagccttaataaaatgacgttgatggcagttttgtaaaaaaaaaaaaaaaaaaaaaaaaaaaaaaaaaaaaaaaaaaaaaaaaaaaaaaaaaaaaaaaaaaaaaaaaagggggg

SEQ ID NO: 973 - DNA, 427 bp, Cyanidium caldarium
  Clone ID: LIB190-019-Q1-E1-B9
cccacgcgtccgcccacgcgtccggtagaggagcaagaagagaagagagaatgctgggtggagtagcgaaacaagagaagggaagtaaaaggtaagaaagaggaaaggtttacgagagaaggaagtagaaagaagagagtgtaaggcggcgtcataatagaaatccgaaaggagtagaagaaaagagagagaagaaagaaaagaagagaaaagccgtactgaagaccgacacaggtactcgaggagaaaggagacccaaattaaggtgagagaatggacgataaggaactaggcaaaaggatatggtatctgcggtaggcttagaagcagcaaaccagagaggaaagcgttaaagcatgaaagaaaagaaatccgaaaaagaagagaaaaaggtaagaaagaggaccgaatcagggtaaaggaagag

SEQ ID NO: 974 - DNA, 420 bp, Cyanidium caldarium
  Clone ID: LIB190-019-Q1-E1-C11
cgattccatgtgtctcctctcgaacttcacaaagtgttgactagctatcaatacagatatctataggcagacagaccgacattccgcaacgactgtattatcctcccaaagtggttatgtcttcccattgagctgacaaccaaacatacccggcaacctgactcttttctagaccatctctataccaagccaaccaatcggtatgcaagttcttcaacaccactctcaactcttcacactgcaacaaggcagtcaaaccaccaactacgacttcccattgtcttgcaaccgcggcattcccaacgagatactgtagttgttgacgtactagtctataatatttgatattgttctgcttgttgctccaggattcgttttcaatgtcccaagtgttcttattttgccacgtagacaacctgt

SEQ ID NO: 975 - DNA, 415 bp, Cyanidium caldarium
  Clone ID: LIB190-019-Q1-E1-C3
agctttacacgaattttccgtggttctcggcacttgcatgagcatactgttattgggtggggtacttggattggtctatgtgctcttgcctggattattgcatggataatatcagaagttattccggtatttaatgaccttcttggtttagtagcttcattatttgcgtcacaatttacttacggcttgtctggttacttttggttatttgataattatgggaagtggcgtagacatcccatcttgacagttatcaacttacttgtgtttggacttggtttgactattcttggtcttggtatgtatgcctcagtgaagagcatcatagtttcgtaccaaactggtcaagcaggtacgcctttcagctgctcttagaagagcgaaactggagcacatttttcgtcacaagtgttgt

SEQ ID NO: 976 - DNA, 250 bp, Cyanidium caldarium
  Clone ID: LIB190-019-Q1-E1-C4
cgcgtcagaaaaaaaaaaaataaccgtaagaaaaaaagcaaataaaaaaaaaaaaaaggcaatcggtgcaagaaggtatcaatggtactataggctcgaccctaaattaagtcacggctaagatcatcaaatgagttcagttcacagggcatcacttgaaatcgtagcttcagggaaaaccctagaattttccaactttatgggctggtaacgtttggccccttccccaataagggaatttgcggaaaaa

SEQ ID NO: 977 - DNA, 332 bp, Cyanidium caldarium
  Clone ID: LIB190-019-Q1-E1-C6
agggaatttgctgatgatgtcctcgctatgtccttttttttgtccccaagcatcaagtaaattgtagacgtttataagcgatgcaacttattaaagtttctttcttgagtgcaaaaaaaaaaaaaagaaaaaaaaaaaaagaaaaaaaagtaacaagttaagaacagaaactaaatatgataatatgcagttaaaaagaaataaaagatgaatcaataaaaaaaaaaaaggggggccgcccaaaaggatcaaaggttaagtaagggtgaaaggaaagttaaaacccttcaaaaggggaaacaaaattcaattcaaggggcgttgttttaaaa

SEQ ID NO: 978 - DNA, 266 bp, Cyanidium caldarium
  Clone ID: LIB190-019-Q1-E1-C7
agaaagtttggttgttttcttggtagcagttgtacattcaacatcatcaaatgccaaagggaggaaagaaagattcttcaaagaaagaagccacaagtaaacctgcaacagcagatgctaacaaaaacgaacaaaaaattcgggccgggaaccaagtttaaaggaaacggttgaaaagaaccattaaaagtttactaagcaaggtcccggtggtttggtaattccggtttgataagttcaagccaatcctttgggaattaattaag

SEQ ID NO: 979 - DNA, 420 bp, Cyanidium caldarium
  unsure at all n locations
  Clone ID: LIB190-019-Q1-E1-C8
agcggacgcgtgggcggacgcgtgggcggacgcgtgggtctttgttttgtcttttgtagctgttttcctcgtagctcatgcagttcccgttggagaagatgcattcagtttcagtcagacttttggaaatgcttctgcttcaggcaacgcctctgttattccagctacaaccaagatccccaagttagaagtaactagtagtgcctcatcaaaggacaatggaaaagcagctcaagtagactttgcagattactcaaagggatatccttcgcctagctatttttacgctccttcttacacatcctatgtggaatttcctcaatatccatcctatccatcatggccttcttttaatgagcagcctgcctttggtggcttcgatcccaatgcagagtttggagagtctganattttcgtgtg

SEQ ID NO: 980 - DNA, 450 bp, Cyanidium caldarium
  unsure at all n locations
  Clone ID: LIB190-019-Q1-E1-C9
ggattgtgccaagagagaatgagtcagttgcaaggttttggcggttttcagtttgacttgttggaaagaaatgaaaaactcaaggaaaagggttatcaagtacctactgcgaggaagacaggtactaccatagttggggtcgtctttcaagatggagttgttttgggagcggatacaagagccacatctgacactaccgtatttgacaaaaattgtgaaaagatccactacatcgctccaaatatttattgttgtggcgctggtaccgctgcggatacggaaaacacaacagcgcttatttcttctcaattaaaattacatcgactgaattcaggtcgtgaatcgagagttactacagcccttactttgttgaaacgaatgttgttccgatatcaaggatatgtttctgccgcacttgtcttangaggcgtcgacttttatggaccgcac

SEQ ID NO: 981 - DNA, 430 bp, Cyanidium caldarium
  Clone ID: LIB190-019-Q1-E1-D10
gtcaagtataagaagaacgaacctttcaatttgtaggaaaacaaccagcaaggagtgtggttacgtgttacgcatgggcgcagataacttgaagttttggaaagatttttgggctggtggctttcctggaggagaagcttatttgaaggaggtgatagagagtaactttcaaaagccagttccaggactcgatactagtggagtaacgggacaaggggaagaaaagaaagcagttggcaaccgaacacagcagcctgccaaagcttcttcgggaaaagactccaaccctccttcttccaataatggcactgccaacttgtcaggtggtggtcaggttcgtctagtaacagacccggtcacaggaagaagtcgtttggaagtcgtaccagaggaatagacaataacttacttagttggtattgtgtacctg

SEQ ID NO: 982 - DNA, 323 bp, Cyanidium caldarium
  Clone ID: LIB190-019-Q1-E1-D11
aaagaggtttgactatacgaaaccttataatggctatgttccaccagagacaagtagatctaccagaatcatgactagagccatgggagcttttttctggtttttcatcatgttacgtgccaagtacgacctacctaagcgaattaaaagccattttgaagagaaaagagaagaagaggaggaagaggaagccttgaaagaaggtggagaacttttgtagtttgttgcttggcggcaaagggtactttcaacttgtgtaaacaactgttgctgccttggagtgtttgctctttaaacaaagcagtcaatttttttccttttcc

SEQ ID NO: 983 - DNA, 450 bp, Cyanidium caldarium
  Clone ID: LIB190-019-Q1-E1-D12
cccacgcgtccgcgtaaatattgtggcggggggtccgtggggacgctttaaaatatttacacaaactgtctgtaaaccttaaactgcagacacatggaacgtggtatgaaagcatccaaggctttctcggaaggcacggtcaagagtagcaccaccgaagtaactataaaagctgcggaaattgtaaacttggtgtgcactttggacttgggcgtccgcaacttggacttgaaacaaatcgccattaaagcaagaaatgcggaatataacccaaagcgttttcaagctgtcatcatgcgagtaagagagcccaaaacaaccgccctcatatttagttcgggcaagattgtggttacgggggcgaaaagcgaagaagagtccaagcgggccgccaaaaagtttgtgtttatcgtccgaaaatgtggatatgacgaagcaaaattttcagag

SEQ ID NO: 984 - DNA, 85 bp, Cyanidium caldarium
  Clone ID: LIB190-019-Q1-E1-D2
tcggtaccattttccttgcccccaaaaacaaacctgaacggctcctaacggggcattgaaaggcattgaaaaaagattacaaacc

SEQ ID NO: 985 - DNA, 421 bp, Cyanidium caldarium
  unsure at all n locations
  Clone ID: LIB190-019-Q1-E1-D6
aaagaaaagaagagaaaagccgtactgaagaccgacacaggtactcgaggagaaaggagacccaaattaaggtgagagaatggacgataaggaactaggcaaaaggatatggtatctgcggtagaacatatgaaagaagcagcaccgactgtttagcaaaaacacagcactctgcagaaaagagaaaatgtaaagtatagagtgtgcggcctgccaaatagtagagaagaaatcgatgaaagtgaaagcgagtaaaagatgaggtatagagaatggcggtcctaactgtaaggatccaaaggtagcgaagtaaatagacgtttgaaaggcgtccagtaagaaaggagacccaaattaaggtgagagaatggacgataaggaactangcanaaggatatggtatctgcggtagaacatatga

SEQ ID NO: 986 - DNA, 346 bp, Cyanidium caldarium
  Clone ID: LIB190-019-Q1-E1-D7
ggccagtgttcctttccagtgtgcaaaatatgtttctcaacaagccaaacaagacaaggtattctgtgaaatataaaaacggcaaagtcgcacttaaagtaacggacgatcaagagtgtcttcagtttcttctagaccccaaatatgattttgaaaaactggaaaacatcaatgcctggtttctgtctaacatgtcccggttaccgacggaacagagttctgtgtaatacagcttcttttttgggtcttattttttatatttgaaatgctatatatacaataaaaacagcgctagtgataagaaatgctttgaaaaaaaaaaaaaagagtaaaataaaaaaggaaa

SEQ ID NO: 987 - DNA, 361 bp, Cyanidium caldarium
  Clone ID: LIB190-019-Q1-E1-D8
cccacgcgtccgcccacgcgtccgcccacgacgtctgcggacacgtgggcggacgcgtgggttgatgagggataggacaagagttcagtatcgtgtaagttattcgcttatgagtgttcgcctcagcttctacaaaattatattagcattttcggctactaggattgacctgggtgggcgtacagtatacaatgtatgggatgacagcttaatcgatgacggtatgtacaataacctttgtggggactcagcctctacagttgtagaacgaggggagcatggagcgtgtagatatgtcatggagttggtgtctataagtttgattctagtctttttcttgtggctttttacatttgtagat

SEQ ID NO: 988 - DNA, 446 bp, Cyanidium caldarium
  Clone ID: LIB190-019-Q1-E1-D9
ttttgcacgttggcgccatgaatggacatgttgcaccagaggtgaaagagctatctacggaagcagaagaaataaaagtgcaaaacgctacgagacggaaacacccacacggactccgaagggaggaaatactacgacaacaccccgaaattgcaaagttgtacggactttaccccgtttccgccatctacatcgtgttgcttgtcgccctccagtggctactcgcagtatactttaccaagtactttccttggtacctttggatgttggcaacgtatgccattggtgcagttatcgaccatgcgttgtgggtacttattcacgacgctacccacaacttgatattcaattccatagcggctaaccgtgtcatgctttgtattgctaacattccccacgtcgttccttccgggatgatgttccgatattatcacattttacaccac

SEQ ID NO: 989 - DNA, 419 bp, Cyanidium caldarium
  Clone ID: LIB190-019-Q1-E1-E1
gatgcggagcctgctcaagttatttttgatattcgtgtatgaagttatctattggtttggaaggaagtgcgaataaagtaggcgttggtattgttaccgataaaggtgatattcttgccaatgtacgtcgtacctacgtttcgccacctggtcaagggtttctaccaagagaaactgcaaaacaccatcagcaacacgttgtccctttaatagcggaagcactgaaacaagcaaaaattgatcccgaacaacttgattgtgtttgctttactcaaggacctgggatgggcggtccactttgctcagttgccgtagcagctcgaacagttgctcagttatggaagaaaccattgattccagtcaatcattgtgtagcacatattgaaatgggtagactagtcactggcgcaagtgaccct

SEQ ID NO: 990 - DNA, 419 bp, Cyanidium caldarium
  Clone ID: LIB190-019-Q1-E1-E10
aactggtgcatcttgccgagttgaggtgaacaattcaaatgaaatgaatagtctcaagtaccggaataggttcacaaggtaattttttagcagtcacttggtttcgtgacagtggaaaaccgcagtgaaaagtttgttgatcaatacagtcaatgtagaacaacaaaattatctgacaagcaccatttgttcaattttgcgtgtgttgtgaaagaacagttggagtgtgcaaagtaccaatacagtctttttgatgtatcttttgctcaaaaagaaaaaaaaaaaataaaaagtcaaaaaaaaaagaaaacaaaataaaaaacagcaaaaaataagaaaattaagaggaaaaaaaataagaaacaaacaaaatggggcggccgcccaaaaggttccaacctaacttacggttgcaagca

SEQ ID NO: 991 - DNA, 423 bp, Cyanidium caldarium
  Clone ID: LIB190-019-Q1-E1-E11
caaaacacaaggcaggctaaataacttgaccatgatgcccattggtgttcccaaggtagcttaccgtgttcctggtgctcctcaagcagattgggtagatatttacaatcgactctatcgcgaacgtattatattcttaggacaagagattgacgacgagatttcaaaccaaatcatagcggtaatgctctatttagactctgaagataataccaagcctatatatctttatatcaactctcctgggggttccgttattgccggtttggctatttatgacacgatgaagcacattgcttccgaagttgtgacggtcaacgtaggcttggcagcctctatgtcttcctttttgttagcggcaggtgaaaaaggaaaacgtttagctcttcctcactcgcgagtaatgattcatcagcctatggg

SEQ ID NO: 992 - DNA, 446 bp, Cyanidium caldarium
  Clone ID: LIB190-019-Q1-E1-E12
agatttgcggtggggattgttcttaagaatccccggaagcacctcggaacgagacgcagcgttgtctcgctatttcagccaaagaaatgaatcacatattcgatagaaaactttctcatggcaacaataaagaacgaacgcccttttctgcagtatacttagcggctggattatcctcgcgtttcggatatcgcataaagtgtctgcaggaagtcggcaggttgggagaaacgcttctcgaactgtccattcggcaactcgcaaaatatggattgagtgatgtgattattgttgtaagtcgttcaacttatcccaaggtgcacctcgttgcaggagatatatttcagggaataccagtcacgtactgctttcaagaaactcctagttacagaaaaaagccgttaggaactgtacatgctttactttgtgcaaaagatgtggtggat

SEQ ID NO: 993 - DNA, 420 bp, Cyanidium caldarium
  Clone ID: LIB190-019-Q1-E1-E3
cccacgcgtccgagaatatgtattttctggttctcgttacaaaatatttctaccaacggaatcgacgatgatagcatttgcacttgaatatgttcgttgtccaccgccatcgaaaaaaactttgtcaactactagtaccgatgatataggagatgcagctctgtattatgccagagacaatattcttcagagagatgtgcaagtgagttttacaacggtggaccgagttggcacctttattggaaagatgaaactgttggagcgaagcactagtagcacggatgaattggaatgggaaaaggccctgttggaacaaggtttaggttatctcaatgaagttatctatgacaaagctcctatgactctaaaggaacaggaaaaagctgccaagcaaagtcgtcgaggtctctgggctactac

SEQ ID NO: 994 - DNA, 107 bp, Cyanidium caldarium
  Clone ID: LIB190-019-Q1-E1-E4
taagtattttccggttctccctagaaaatatttccaccaactgcatccattatgacagcatttgcgactggagatgttcgttgtcgacgccatcgaggtggacttgg

SEQ ID NO: 995 - DNA, 412 bp, Cyanidium caldarium
  Clone ID: LIB190-019-Q1-E1-E5
caaatttcaaacgccgcgctttttgagtgcaagtggcttttctctccgcgaaaaggagtgaaccgttttgtttggttgcacgtatcgaactttctctagtgtggaaatctcgtagagtcaattatacaaggaagaaaacccctggtaacacgtggtaaggtgtgactccatggagccttggaaggaaagctccagcacaccctctacggaaaaggggacttggaaagaagagccttcgagttgttttgaacacgactcaagtgcaactatagaagaaacggaggataagcttgcaaagggccgaaaagtaatagggtcgcttccactagatgcagaaaccgatttgtccgaagccacaaaatagtttcattcatctgaagcagcaggtatttctgcgttagctgctttagca

SEQ ID NO: 996 - DNA, 138 bp, Cyanidium caldarium
  Clone ID: LIB190-019-Q1-E1-E6
ggcatggaacaagaccgactataccagtatccactggtggaagttgcaaatcacattaccaaaaaggagccttgatttgggttggccggaaaatacatggacttaccccgtttccggacaaacatccgggtggagaac

SEQ ID NO: 997 - DNA, 417 bp, Cyanidium caldarium
  Clone ID: LIB190-019-Q1-E1-E7
cggacgcgtgggttgatggacaaacctcaagtggatcatcccacgttggtaaagatagacttgtctcaaggcagctttaaagtactccaagactgtgacagagatttagaatgtgatcataataccaagtttcagttggaacttattcagtatggtctcttttcacctggtttttggacgagagaaaatgttctgctcttctatttggagctcgtgtcaggtgtattcataagggacactctctaccttttctacaacaaaggtgaagaacatttgtttgcgagtttaatgctgttgttggagacacaagtttcactgtatgcagacataaaaacaaactgggagaaacgacactttatcgtttgcctcatcgtcaggtctttgtgtgaggaatatcaacgacagtattcagagcta

SEQ ID NO: 998 - DNA, 420 bp, Cyanidium caldarium
  Clone ID: LIB190-019-Q1-E1-E8
ggtgattgggtggcgtttgacaacaaacttcgatatgcttcctttaaattagttgtttgttcgtgtgagaaacagcctcctttgaatatatggcaggggaatctgtgtcattgcttaccgaagttgtattcgagtggagataccccgcctccagtgcctttgtgacgggcactttcaacgactggaatgatttgttaccaatgtcgcggttccaagaaggtgaagaagaggtatggagagcaaccaagtcccttccagaaggtgtctatcagtacaaatttatcgtggataacgtatggagatgtgcaccagatcaaccttgtgtaaaagatgaacgcggtatcttgaacaacattattcacgtgagttatgatgaatgcgacgataaatattgcttttgtcattcaagaactattgcga

SEQ ID NO: 999 - DNA, 435 bp, Cyanidium caldarium
  Clone ID: LIB190-019-Q1-E1-E9
cttgtaatcatctctttccatttttatggaatatcttttactttaatcgcacaaaacgtcatattttgacacgctctattctttatctcaagctgtgtacgaatagtcgtcgtcatcgctacgatagttttacaaaggaaacaacttggagtagttctatgtggttaaggaatatgggatggaaggtgtggcagtcacatgtcaaagagtgggaattggattcgatatccaaagtcaactatattgttcatcgattggattatcttattcaggatatatttcatgttttatgtctcaatcgaggaaagcaacgtagaagactgcttaatttattaagttttgtggagccactttatatgcagtcgattgggaacaaagaagaaacggcagcaacgaatcctctgtctttatttattcaagagttgggtttcatga

SEQ ID NO: 1000 - DNA, 417 bp, Cyanidium caldarium
  Clone ID: LIB190-019-Q1-E1-F10
cccacgcgtccgcccacgcgtccgcggacgcgtgggcgagagtgatatagaaaacgatacaagttgcaggctttatcaagaaatgtcgacttgtacctcgagtgaagtgtttcagtcctgcaaccatctatccaatgtggttttaaagttggatgctgagagttttttgttccctgtgcatagtaattcaggaattggttggtggagaacaagtttccgtttatccgaagaaatatatacaacttgcgacggtggcgattttcacatgccacttgcactttgtctcagtggaaatgctcactgttttgcttggatcaatcagttgcagattgctcgttatgtggcaaatgttggtccacaaaatgtattttatattccatgtggcttgctgtatagaaacgaagaaaatgtcctgac

SEQ ID NO: 1001 - DNA, 446 bp, Cyanidium caldarium
  unsure at all n locations
  Clone ID: LIB190-019-Q1-E1-F11
gaaaaagaaaagttgtttgaggaccaaacagagtgacaagaagagatggcaaggagaatattgggtgcttatatgggagatgccacagtggcaactctgttcagtatcaaaatgttgttctatcttactatcatgggtttctccataactatcttggctctcatgggaaagaactcggatggtatttggatacatagtgtgccacctgcagatcaatattgtgcatacaagtcttcattggaggtgaaccaccatggaattgcttcctattgcaagtatatcgttgccgtagctgctattgggttggttatctcgtttttccagttttgctacggtctgttgggtatctttttcaagtggcaacaaaagttgtggtatattgaagatgctttcaatctatttttctgggcttggtggttggttggtgctatcgttgctancgctgc

SEQ ID NO: 1002 - DNA, 399 bp, Cyanidium caldarium
  Clone ID: LIB190-019-Q1-E1-F12
gttaactctacgagtttccagagttttcatcgatgcagtgaggaaggagctgaatcctcagatgtaacccattgtggaatacagggtggttattgtcgcatttgcaaagagcaaaatacacacagtcccaacttgtcttttcataaggaatctaaaaattctagtggcttggaggctcgtgtgagaagcaaatcatttccagaatactctgtggaacataacaacactattcaagaagagtatatgagccgtatgcggtcgtgttctcaagttcttgaagacgagatatacggaacaaaatcagacaactggatgcatgtttctgatgataaaagtccaaactcgtttgtagcaagaggtaacaatgacataacatatgtaggtgagagacaagatttt

SEQ ID NO: 1003 - DNA, 344 bp, Cyanidium caldarium
  Clone ID: LIB190-019-Q1-E1-F2
aaaaaacggtggagaaagcaacatgggaaatttcttttccaaactatttcagagactgtttggaaacaaggaagttagagttttaaaggttggactagataatgctggaaaaactacgatattatgttagaagaaactcggaatacagtcttctttttttcaaccagttgcactgtacaccgaatgaaagaagatagcgcgattaagactgtgccaacaattggttttaataaggaacaaattgaagtcaacaacttgaagaatcaagttatggaccttggaagacagtcatccaatcgaccatattggcgttcttagtaacagaaacaagaaacgttgaattt

SEQ ID NO: 1004 - DNA, 375 bp, Cyanidium caldarium
  Clone ID: LIB190-019-Q1-E1-F3
acccacgcgtccgataataataaaatggtccggcgtgaccgttgacagcagaagtaagtcgattcatgttatgatatccaaagaaagactgtataaacttccaaccatgcttttgtataataagaatgtaccaaggcaagcttatgagggcaccagatagtattccaggtatccaaggaacttctgataagactacttgcttcaagtttccagtagcccataagaatatggacaggatgcagacgggtaagaacacgcccaaaggtccctttgttaaaacagccaaagcacaaaatacaaagaacataaaataataaaacttgccgaggtgcgtatggttgtcaaaaaaaaaaaaaaaaaaaaaaaaaaaacaaa

SEQ ID NO: 1005 - DNA, 298 bp, Cyanidium caldarium
  unsure at all n locations
  Clone ID: LIB190-019-Q1-E1-F4
agcggacgcgtgggatcgactcgaaaatggcctataaatagcgtgatcatttcccctttttgtttgtttatcgtttgtcaaagtttggttgttttcttggtagcagttgtacattcaacatcatcaaatgccaaagggaggaaagaaagattcttcanagaaagaaaccacaagtaaacctgcagcagcagatgctacaaagacgacagaaaagtctggtccggaagccaagttgaaaggaactggtgcaaaaaaacaataaaaagttgactatgcatgtgcaatcctgttaagtttt

SEQ ID NO: 1006 - DNA, 422 bp, Cyanidium caldarium
  unsure at all n locations
  Clone ID: LIB190-019-Q1-E1-F5
gcagagagggactatgagcgagaaggtggatagtcgagagggaaaaagcccagaagccaagataaggtatcaaagtaaagaaagaaggaaaaggagaagaagagagggtaggcttagaagcagcaaaccagagaggaaagcgttaaagcatgaaagaaaagaaatccgaaaaagaagagaaaaaggtaagaaagaggaccgaatcagggtaagaggtagaggagcaagaagagaagagagaatgctgggtggagtagcgaaacaagagaagggaagtaaaaggtaagaaagaggaaaggtttacgagagaaggaagtagaaagaagagagtgtaaggcggcgtcataatagaaatccgaaaggagtagaagaatagagagacaatanagattagaagagaaaagccgtagacctccaatcag

SEQ ID NO: 1007 - DNA, 355 bp, Cyanidium caldarium
  Clone ID: LIB190-019-Q1-E1-F6
aaagattcttcaaagaaagaagccacaagtaaacctgcagcagcagatgctacaaagacgacagaaaagtctggtccggaagccaagttgaagggaactggtgcaaagaaacaataaaaagttgactatgcatgtgcagtcctgttatgttttgtgagttctgtttgatagtttccagctattcttttggtagtgaataaagagaaaattttttatatttaaaaaaaaaaaaaaaaaaaaaaaaaaaaaaaaaaaaaaaaggaagaagaacaaaaagataaaaaaattaaaataaacatgaaagaaaaataaaaaaaatatcaaaaaaaaaaaaaggggggccctccaaaggggt

SEQ ID NO: 1008 - DNA, 323 bp, Cyanidium caldarium
  Clone ID: LIB190-019-Q1-E1-F7
gttggtggtttcttgtggcgtgtgtgggtgacgttgttaccgacgactgtgtgagagactacttgtacttgcttcattctactagttgaaatatgacgagaggcaaccaacgtgaggtagatagacaacgagcacaaaagagggcagagaagcacaagaaaaatgttcagaaagaaaaggagaatattgttttgaaaaaggaaagggacgccgaaataatgcgccaaaaacaagcagcagccatggcaaaacagcaacaaggagaaaaagtttaaatacaagtgttggtgctgttaataaaacacttacaacttactgcttct

SEQ ID NO: 1009 - DNA, 424 bp, Cyanidium caldarium
  unsure at all n locations
  Clone ID: LIB190-019-Q1-E1-G1
cccacgcgtccggttgaatttcaatgacgctcattaaaagtgtggatgctcgagagattctagactcgagaggaaatccgacagttgaagttcaagtcactactgaactaggtgttactcgtgcagctgttccttctggtgcttcaacaggagttcacgaagctcacgagttgagagataacgacaagtcgaggtttctaggaaagggagttacaaaagcagtacaaaatgtgaagaccgaacttgcaaaagctgtgattggtatggattgtcgggaccaggcagcgattgatcgcaagatgatctctttggatggaactccaaataaaagtagactgggggctaatgctatacttggagtttccatggctgtntgtcgtgccggcgcacttgccagaggagtttccttgtatcaacatatcaa

SEQ ID NO: 1010 - DNA, 440 bp, Cyanidium caldarium
  Clone ID: LIB190-019-Q1-E1-G10
cgaaaagctcagcttgaagaacaaagaacttgcgtggggttggacgttatttatgaacttggactctattgacacaggaattaatgctccttttgacccgtttgcagacgcctcacgtggagaggacgcagcagtaaccaaaaatatagtgcatattcgcttgcaacaaagaaacggccgcaagtgcttgacgacgattcaagggcttgacacaaaattggatttgaataaaattacaaaggccttcagaaaggagttttgttgcaacggttgtgtcgtagacgacgcagaactgggaagagtcatccaactgcaaggagaccagagggataaagtcaaaaagtttctagttcaggagaaattagctgaaaaagacctgataaaggtgcacggtatatgagtgtcgttgccgtgtaaagacacaaagcagtcgtcagtgt

SEQ ID NO: 1011 - DNA, 415 bp, Cyanidium caldarium
  Clone ID: LIB190-019-Q1-E1-G11
cccacgcgtccgagaagagaaaaaggtaagaaagaggaccgaatcagggtaagaggtagaggagcaagaagagaagagagaatgctgggtggagtagcgaaacaagagaagggaagtaaaaggtaagaaagaggaaaggtttacgagagaaggaagtagaaagaagagagtgtaaggcggcgtcataatagaaatccgaaaggagtagaagaaaagagagagaagaaagaaaagaagagaaaagccgtactgaagaccgacacaggtactcgaggagaaaggagacccaaattaaggtgagagaatggacgataaggaactaggcaaaaggatatggtatctgcggtagaacatatgaaagaagcagcaccgactgtttagcaaaaacacagcactctgcagaaaagagaaaatg

SEQ ID NO: 1012 - DNA, 424 bp, Cyanidium caldarium
  Clone ID: LIB190-019-Q1-E1-G3
cccacgcgtccgatttgaaaggaggggtcgacgagctcagcttgaagaacaaaaaactgcgtggggttggacgttatttatgaacttggactctattgacacaggaattaatgctccttttgacccgtttgcagacgcctcacgtggagaggacgcagcagtaaccaaaaatatagtgcatattcgcttgcaacaaagaaacggccgcaagtgcttgacgacgattcaagggcttgacacaaaattggatttgaataaaattacaaaggccttcaaaaaggagttttgttgcaacggttgtgtcgtagacgacgcagaactgggaagagtcatccaactgcaaggagaccagagggataaagtcaaaaagtttctagttcaggagaaattagctgaaaaagacctgataaaggtgcacggtata

SEQ ID NO: 1013 - DNA, 402 bp, Cyanidium caldarium
  Clone ID: LIB190-019-Q1-E1-G5
gaaggtggttgtgttccaccgctcaagcaacctcgcgtttctcagtttcgaccacaagacgttggtcttcctaaagactttcttttaacttcattttctcgtttaaagggctgaggatgtaaggttcctcaggcagaattagaaggtctcttgggtcgttttttgacgcaaccacacagttgtagcccgagtcaaggagttggttcggattgctctctccagccaagccaagtacctgatgtgtatttagcctctacaacagactttttctttccgctcgtggaagacccttatactatgggcaagattggagcagcgaacgtattgtcagatttgtatgcagcaggaatagtcgattgtaccaatgtcttgatgatattagctgcaagttcagatatgcct

SEQ ID NO: 1014 - DNA, 439 bp, Cyanidium caldarium
  unsure at all n locations
  Clone ID: LIB190-019-Q1-E1-G9
cgacgagctcagcttgaagaacaaagaacttgcgtggggttggacgttatttatgaacttggactctattgacacaggaattaatgctccttttgacccgtttgcagacgcctcacgtggagaggacgcagcagtaaccaaaaatatagtgcatattcgcttgcaacaaagaaacggccgcaagtgcttgacgacgattcaagggcttgacacaaaattggatttgaataaaattacaaaggccttcaaaaaggagttttgttgcaacggttgtgtcgtagacgacgcagaactgggaagagtcatccaactgcaaggagaccagagggataaagtcaaaaagtttctagttcaggagaaattagctgaaaaagacctgataaaggtgcacggtatatgagtgtcgttgccgtgtaaagacacanagcagtcgtcagtg

SEQ ID NO: 1015 - DNA, 295 bp, Cyanidium caldarium
  unsure at all n locations
  Clone ID: LIB190-019-Q1-E1-H1
agacaaaagtgaaacaacttgtcagcagtggggaaaattgggcaatgtacagggaagtatgacccagtaatgaggagtggagtaaacagaaaaggaagtaaaaggagggaatgaagggaagttatggcaaaaacacgtgccagcagcagcggtaaaacgtgtgtagcaagcgtagagcagaagaactgggtgtaaaggtcgagtagtanagtaagtgtaaaagggaaaggaaaggagagaaagaggaaagggatgaaatgcagagatctctagagaaaggcaagaaagaaaagaa

SEQ ID NO: 1016 - DNA, 435 bp, Cyanidium caldarium
  Clone ID: LIB190-019-Q1-E1-H10
cccacgcgtccgcccacgcgtccgcggacgcgtgggcggacgcgtgggttggcaatgagtgagttggtgcgacctggtcgtgtctttgatatcggctttggtgacttattttcatggacgaatgaccccttcttccgtgatgcatggaacatgatacctcgagtaggtggagctgattctcagttatggtcgccgataatcgacctcattgaagaagaagacgcgtttctggtgaaagctgacgtacctgtagtaccgacagaaaacattaaagttgacttgaaaggggatatcttgagtgtgtctggagaaaatgctgacgaaaaaaagtcggatgaagatagagaaggaacggtattccataggatggagagaagctactgtaaatttgaacgaagtatatgactaccaaagcagattgacaagcagggaatc

SEQ ID NO: 1017 - DNA, 415 bp, Cyanidium caldarium
  Clone ID: LIB190-019-Q1-E1-H11
gaaacacagatggactttgcttgtcgagacttggataatctagaagcaatgaacatgcaggtattgcgagagcgtgtgaagtctcatgggacaacagaataactcaaataataacgtttcgactattggagacttgggcatgaaagatatttggaagctttttcaatagagaaaacgaatggcagtgctatgccgtgtagattatattcgtgaaagaacaggagaatgattttatctacaaagagatgccttgtgtgattggtactattttcgctcttttccgtctcaaagattgtccttgtcatcatctgcaccgtatttcaagtatgatttaaaattatattgaactcgaagttatgtatttcctgtagccataatcatttccctaagacaagaatggatgaagaaaggaatg

SEQ ID NO: 1018 - DNA, 394 bp, Cyanidium caldarium
  Clone ID: LIB190-019-Q1-E1-H12
ggaaaaaagaatgttggtattaacaataggagattttcatattcctagtcgagtggctgcagtgcctctcaagtttcgagaacttctcgttccaggaaaaatacaacgagtattatgtactggaaacttgtgtaacaaagagacagaagagttcctcaaagttatttgtcctcaagtacagattaccaaaggtgatatggacaacgttcagtcagaatatccggaacgttgtgtaaccaacgtgggacaactttcttttggtctttgccacggacatcagctaattccctggaacgatacaaactcgctggcggcacttcggcgagatatgggtgtagatgttttagtggttggtcattcgcattcgttgaaaatgacagagacgatagatgga

SEQ ID NO: 1019 - DNA, 425 bp, Cyanidium caldarium
  unsure at all n locations
  Clone ID: LIB190-019-Q1-E1-H3
agggcgggacatgatcaagtggtagcgtacaaacgttcagaagaagaaaaatggagccaagcaggtgaaaaaagatggcagttattcaaaagactggaaaaagagaatgctactgcccgctttttcttacaaaacaaagctatttttccaggtgctagagttttggaactggcttgtggttccggagaaaccactttgcaagtagctgcgaaagtaagaggctattctgtaccttcaggagagaccacgggggaagtggtggataaattgttggatatattacgtccatcttatcaccaggaagggaaactggatggtgccagcaatagtggttcggtagtaggtgtagatatcgccaaaggaatgctgaatgtgttcagangcangttggaaaatactgttttgaaagatcacgtgcaacttgt

SEQ ID NO: 1020 - DNA, 367 bp, Cyanidium caldarium
  Clone ID: LIB190-019-Q1-E1-H4
tcgggcaaaacaacaacttcagggaaacaacttggaatcgccacctacaaatacagaaataggaatggaagatacttggaataacacgtctcgttatatgtctattttatactatagctggataagatggcgtcatttattgcattcctgtcgacattgggctactcctccctcgattgccatcgtatcggcattattacttggaacgatattcaagccactagctctattgttgataggttccaatgctcctttgagagtagtggttgctgcccaagaaactttgggtgctgctgctattgcattgatgtccttggtggttggtgccaatttgtacaattcttataaacgtggattccgtaccaat

SEQ ID NO: 1021 - DNA, 425 bp, Cyanidium caldarium
  Clone ID: LIB190-019-Q1-E1-H8
gtttgttgttggtctggttgctcaaggtgtgaaatggcagtagttgaagataacagagtctttgttggtggtcttccttggtcagttagtgaagaagaccttcgtgaaactttttccaaatatggagaagttgttgatgcaagggttgttgttgaacgtgaaactggtcgttcccgtggttttggtttcgtatcctatgcagaaggttcctccgtagacgaatgcattgccgcactggatggcaaggatatgcaaggacgcactattcgtgtgaacaaggcaatgtctcgtgaacaacgcgagagtggaggagactttcgtcgcggtggtcgtggacgatacggaggttttcgttccggtccttatgagagacgtgaacgtgactctgatcgtagaagagatcatgacaggagagataacgggca

SEQ ID NO: 1022 - DNA, 447 bp, Cyanidium caldarium
  Clone ID: LIB190-019-Q1-E1-H9
gggagggaggatgatggtttggttgcggttatgggtggggttgacagggatggcaggtttcgctgcggcgataggtgcctggtggaacccatcctcgcccatcgataccatctaccgaaacattgcaccatcgcatttgctcgcatctccaatggatgaagcgtcgtcgtcgttggtaagccgcttatatgccacctggttatttctttcgaccgttgtgcgatgtacttttatgctatcttccgagttttccttgcctctagccgtcgtcaccttggccacctatgtcgtcgcgtgggtgcactttgcggtggaaatatttatttaccacacggtgccgttgaaacctggtggtcaagcacctttgttggttgcctcggtgtcgataggttggatgctgtggtatttgatggcgatgcggagtacaaggaaagcagaatataggaa

SEQ ID NO: 1023 - DNA, 391 bp, Cyanidium caldarium
  Clone ID: LIB190-020-Q1-E1-A1
agtcgtggttgacctgttttgctgtgttccaagggtttcctttgcagtgtaaaaataaaaataataaatgggacatgactttgcaccaaaacgataatcgctgcttaataaaagaaaaatggaaagatattcaatatagacagggaaagtggcaagacttttccgttatcttttctgctttatggagagaaaaaatgaatatcacgggagcttttagtccccagtattttgttattgcatatctaccaaaggatgaacttgatgtgttgttagggtttgggcacgtgtgtgagaaattagtagtaaggacgtggaagttattattcgtttgtagatcaaacctatcaatgagagagcaagaaagttggcttccttatacgtatatcctgag

SEQ ID NO: 1024 - DNA, 409 bp, Cyanidium caldarium
  Clone ID: LIB190-020-Q1-E1-A10
aggacgcgtgggcggacgcgtgggcaagaggagaggacattgaattgttcaggtcataagaaaggaaatggtgatggaataacttctgtttcatttagtcctcgttctccttatcgtattgcaactggttcgttggaaaagacagtgagagtattcgatgtagagaccggtgaacttttgcacaattttcgtcaacatgcagattctgtatattctgttgccttttcgagcgatggaagatatctgttatcaggttcacttgataagaatgttatattatgggatcttgcagctccttctccaaataactatacaattttcaaaggccatactgactttgttttgtctgtcgcatttagcttaaacggtcgtcttctcttgagtggcagcaaagaccgtactgtaactt

SEQ ID NO: 1025 - DNA, 390 bp, Cyanidium caldarium
  Clone ID: LIB190-020-Q1-E1-A11
actcccgggtcgtccgagatgaaagaagatgcatttcctcgagtttatgacgacgcgagatggtttgggttgaaaattgttgtattggatcaagcgagacctagcaaatggtcttttggggaaaattccgcaccacaattgcaccgattggagcgactattggaggaattggatgcttctcgttgtatcgtggttggacattatcccgtatgcaatgccgatggaagcttatccgatacgtttggtcgcagtttaaaagatgtgggcgagttgtaccaagtattgtgtagacaacctcctttggcatatttatgtggacatgatcaccaacattatgtgcaatatatgcaagttggtggtggaaacggtcgagtgccattgatatgttgt

SEQ ID NO: 1026 - DNA, 425 bp, Cyanidium caldarium
  unsure at all n locations
  Clone ID: LIB190-020-Q1-E1-A12
cggacgcgtgggtgatgatgtgggacaaaacgacttggacttttcttcagactccgcaattcttgaaagcgttgcgtgtctcatgtttcttccctgcaaggcatcgttattcataggaacagaggatacaatctcctctttggatagcatacaccggttcacggatttgagttgttccttcgcactccgcaactcagtccccaaagattctaattcttttactagacaacgacgctcttcaagcaactcaagtttctttttctctgctttacataagctactgttggtttcttcttctttggatttgtagaaaccaacgagtgcttccagctcctcgtttaggccttgtatcactgccttcttcttctttcttgatcgtgacgcagagtcncggtttctcagttttcttttataaagcatgatat

SEQ ID NO: 1027 - DNA, 400 bp, Cyanidium caldarium
  Clone ID: LIB190-020-Q1-E1-A2
ataatgaaacctcttcaattctacttgcttcaaaaggagctcgaaggttttccaacgtacttgctggtaaaacctttggttctgttcctcttgcgaacaaaggctccgtgaagtcttttagcacaggttcgctctctcacgttgacagggaaggcaacactgcttcaactacttttgactttaccgatgagaattacgagaagattgagaatattttgaagaaataccctagaaattacaagtcgtcagcagtgattgcattgctcgatctagcacagcgacagtgtggtggttggattcccttggcagcgatgaatcaagttgcaaagattttagagatgcccccgataagagtctatgagattgtaacattctattccatgttctatcgtgaacctat

SEQ ID NO: 1028 - DNA, 392 bp, Cyanidium caldarium
  Clone ID: LIB190-020-Q1-E1-A4
cgaagattggtgggaaaatgtcggaagaacaaaaagacaatcctaacaagaccgcttccgttgtttctgaacaagacaaccaaagtgaaaaagaacaagatacaacaacaactgttcaggaagaacaacaaaagtacaacaataataacaacaatagtgagaactctacagtccttggtgaagataccaagtcccaactagtgagagcctttgcggatgttaccaaggtttcgtcttcgcaagctgaagaatatcttgaaaacgccaactgggagctacaaacagcagtacgacaatactttgataacaacgagaatgcgactatcggagaaagtcctgtccctactgcggatagtattgcagcacacattacagaaataagaaagaaagca

SEQ ID NO: 1029 - DNA, 383 bp, Cyanidium caldarium
  Clone ID: LIB190-020-Q1-E1-A5
cccacgcgtccgggacgatggaaggtgttcgacgtgctttctatgtagttggtcagatgataagagaaacatgtcaatcgatggatcacttgggtatccgagttcaaggaggttatcattatcgtgaaccattgagtagacataggcagttgatgaacatcggattaaagaaaccagtatttgaagacaatgtatttatcgctcccaatgcttcggtgattggcagtgttcaacttggagccaatactagtgtgggctatggtgcactgttgagagcggatgccgtacccatcgtggtttccagtggcagtcatatcggagataatgtggttattcattgtactcgtacaccggaagaacgaggaaacccaacgtttatcggg

SEQ ID NO: 1030 - DNA, 436 bp, Cyanidium caldarium
  Clone ID: LIB190-020-Q1-E1-A6
cccacgcgtccgggcaatccaaaatggttagtgcctcatatggtgtttactggaaatcgaccttcctcttgtctcttgatgcctgtcttagacgcgtatgttacgggacaacttttggggctttatgaacatcgcacagccgtgcaaggattcctttgggagattaactcatttgatcaatttggagtagaattgggaaaagtcctggcaaataaagttcgcaagcagttgaacgaaagcagatattttaataaagatatctcagggttcaatccctctactacaaggctgctcaatcgatacttggaaggttctgtaggatgtgctttcgagcatgtttatcattatgagtagtttgtttcttgttttggtggagttgattttttgataaaaatcatcgagttttataaagtacgatagagcgatgtgtgtcctt

SEQ ID NO: 1031 - DNA, 433 bp, Cyanidium caldarium
  Clone ID: LIB190-020-Q1-E1-A7
atctgatgttgcgaccttatctgcaaagcaaaggtcagaatgtcgttgtaaataatgatagagcatcagtttcaccagatgaaactggtgacgacaagtatgtcgagagttattcgggagagttacaaccaacttttcgggaattggaagatggaagtaagcttttggggtgttcgcattatttacgaggcgcgaaaattcgaacagtttgttgttccaaattttatacttgtcgattgtgtcatgatgaagtggaggatcacaaggttggagacaaccgctatgcaactcgtgaaatgctctgtatgcattgtggccatattcagcctatatctcagtggtgttgtaagtgctcaaaaagaatggcacgttacttttgtcccatttgtaaattatttgatgatgattcatctcgaaacatatatcactgtca

SEQ ID NO: 1032 - DNA, 441 bp, Cyanidium caldarium
  Clone ID: LIB190-020-Q1-E1-B1
acccacgcgtccgcccacgcgtccgtgcatctcgttacaacttggaacaatggcaccttccaagattatgacccaacctatagtaagtattatattctatggtctcataaaagtatcgacgaatgtttgtcggcagaatttgatatttcgtttcttgcaaaaccgaaccaaggttattatttggttatacgaggaaaccagttgtaggattgaaggaaaaataagtggcttcgatgagtatatgaacttggtcttggatgaggcagtggagtggaatataaagaagaacacgagaaccaatctgggtagaatacttctcaaaggggacactattactttgattcaacccgcttaggaggaaagcggtgtgtgtcgtccgttgacaccaaacagagtttttgtgtcaatagacaaagagctgtaaagattagagactacaac

SEQ ID NO: 1033 - DNA, 375 bp, Cyanidium caldarium
  Clone ID: LIB190-020-Q1-E1-B11
ggagaggaaaaggactgtcatattttttacgcagctaggagcgttatcagtcctcctcctccacctccaggaactccagtttcttatggtaccaaggagaaagttatggaagcccttagaaaggcagaattttcagatgtaaaggcggtggagtttgaggttgttcatgaaaccaaagatgccgaagaatacatcacccttatgtctggtgtcaataaatggatggaaaaaagtttgggagagaaaggttccgaactttggcaaaaattagtaaattattgtaacgatcgttatcgcactccaaatggtaatttgcgatttcctaatgtttgtgtcggagtgacggcaattgcttaataaaagaagagtgtccgt

SEQ ID NO: 1034 - DNA, 356 bp, Cyanidium caldarium
  Clone ID: LIB190-020-Q1-E1-B2
gtcgccgtcttggaccgcacattgttttggtggtcgcttttgtcgttcaagaaaggacgttgtagtagcgatatttatcgatatggccaaaagtaaaaatcataccaaccacaaccaatcctataaagctcataaaaacggtatcaagccacctcgacagcaccggtttcaagggagaaagggggtggatagcaagtttctacgaaatcagaaatatgcaaggacgggaacgattcgagcgttgagaaagcagcgcaaggaacaagagaaagctagaagagcgacaaaacagtagatgttggaaatggatattttcaatacaagctagtaaaaaagatatttcgagtagatggttt

SEQ ID NO: 1035 - DNA, 375 bp, Cyanidium caldarium
  Clone ID: LIB190-020-Q1-E1-B3
cgaccttgctctactccttaaatttgaaatattgctattacaagttctcaaatgggaacttgccgttcctcatgcctttgacatcttctgtgcttgtatagattacttgcggtgtagtaatgatgtctccttggttacatatgcttacagtttgttgcaaaaatatgccaccgagtattccatgctaagactttctccttccactttggcaattcattccattctggtggctcttcaccgaaatgcgtctgcttctcgttttgataaaagtctttgcgaggatattgagaaaatttctacccttctccaggttactccatcgcatcagaatgagtttcagaatctactaaaggcagtgaagagaagaatcttctg

SEQ ID NO: 1036 - DNA, 356 bp, Cyanidium caldarium
  Clone ID: LIB190-020-Q1-E1-B4
aagaagatggtctacgagatgcgacgagcggttgcttctcacgcgttacgtgcatatgtccctggcaagtttactcgttccgtactaagtatcttgtgcattagaagtgcaggtgttattggtgctgtgggagttgtttgttttatatgctgtagtatcaatccgagaaacgttatcagcaatgtatatcacattatatttgcagtgttgataatcctttccgagttgggtttcacttttctgttgaagcggtttgcgtttttagatacgttttttggacttggaatattttatattttcgtgagtttattggcagtggatactcactggtttcagatattggctggagtagttgt

SEQ ID NO: 1037 - DNA, 400 bp, Cyanidium caldarium
  Clone ID: LIB190-020-Q1-E1-B6
atttcatcatcaaccagaaacgactgttatatttgcaaaaaacagagaaaagcttattcaccttgtattcaacgaacttctttcagagctgctaatctttttgtggtttgtcaaaaggagaacgagtcgcctgaacgagacgcaagtgaaacaactgaattaaaggattcctctgcgcctcagtctatatcgatagatgaagcaaaccgaatatttgaaaaggaagcttattcaggtcatgaagcagagccagtacctgaaaaggaaccttatccgggttattatcgggacatggaacaaatgggtttaaaacctaaaccaaagaatgacggactcaaagttggtggtgtcaagtccttgtacagagcagatggcactccatatgctccttggttaattg

SEQ ID NO: 1038 - DNA, 407 bp, Cyanidium caldarium
  Clone ID: LIB190-020-Q1-E1-B7
cccacgcgtccggaatttcgtacagatgagctaaaatggatggaatcgactcgaaaatggcctataaatagcgtgatcatttcccctttttgtttgtttatcgtttgtcaaagtttggttgttttcttggtagcagttgtacattcaacatcatcaaatgccaaagggaggaaagaaagattcttcaaagaaagaagccacaagtaaacctgcagcagcagatgctacaaagacgacagaaaagtctggtccggaagccaagttgaagggaactggtgcaaagaaacaataaaaagttgactatgcatgttcctgttatgttttgtgagttctgtctgatagtttccagctattcttttggtagtgaataaagagaaaattttttatatttaggtaagaggaaaaca

SEQ ID NO: 1039 - DNA, 441 bp, Cyanidium caldarium
  Clone ID: LIB190-020-Q1-E1-B8
atcacttccgacctttgtaaagtttctatgccgttgcttttatctttgcaaagttttaaattaaaagcatgattctgaaatagtgactgtatttctcttgcaggagtttcgtcttgagggagctagtaatagggagcttgttctctgcagctcgctttcttatgtctatcatagtattctatatatatggcttaagtttcaaacgagagtccttgaaataagaaccaagttggcaacagttttgcgttccttggtattgaacaagcacaagctacatgaaactgacaagaaaacctttctcgaggtattttaaatagtatatttgttattttatctcctgagttcttttaataactgccaagagtgttgtcaactagatttttactttagtggttatttaggagaaaaattgttaccttgtcctacagtgaaattactttt

SEQ ID NO: 1040 - DNA, 430 bp, Cyanidium caldarium
  Clone ID: LIB190-020-Q1-E1-B9
gaaaaacgtgtcatatggcgagcttctaagagaccgcctccagaagattctgctggcttcaattttactgcgtttgcaattattttgaatgagttgacgcctagtattgaagagaagattccaccgacggactcgagaaggagaccggatcaacgggctttagaagagtctcgctttgccgatgctgcgaatgaaaagcaacgtttggaagaaaaacaaagagctgctaggaaggtaagaagaatatgagctacaagatgtatgttttctgtgatggttgatgaggaggagtatagatgagagaagagcgaggggaagaatattctccattatggtttgactggaaatatgaccaagtcaccgaaaagtacgattggaagtttaatggcaaatattatattcatcgcaaagaaaagaaatgggacatatg

SEQ ID NO: 1041 - DNA, 390 bp, Cyanidium caldarium
  Clone ID: LIB190-020-Q1-E1-C1
cggacgcgtgggcggacgcgtgggagtattcataagcattttgggctttttgttgcttttatccttttcttccatgttttactggatgcgaaaaaatgctcctcgaacggacttatagatgcttatcgatggagctttccgcggtgtaatgactttgaataataaagttgggttgcttccatttattacgatagacagtcagggtgtttcgatatgtttatcaagttgttaatagcagtgtttttcttgatcaaccattgtttttgaaagagtatttgaagagcctactacctacgaaaaatgaagcaaggatgtagaatacaatagatatttttaaactgtccacaaggaataggcgttgaacaatataaaaaaatttcccttgccaag

SEQ ID NO: 1042 - DNA, 103 bp, Cyanidium caldarium
  Clone ID: LIB190-020-Q1-E1-C10
attcggtctccttttcctccacttgccacaatatagcaatagaacctgtcttttctcccaacagcgtttattttatatcgagtaaaaaaccttgtttcacttt

SEQ ID NO: 1043 - DNA, 395 bp, Cyanidium caldarium
  Clone ID: LIB190-020-Q1-E1-C11
cccacgcgtccgcccacgcgtccgcccacgcgtccgcccacgcgtccgagagaggaatcgatcaagcagtcaaggcagttacagagaaacttagaagtatgtccagaaagattaattcgaaagaagaaatacaacaagttgctacgatatctgccaacggagatgaagaaataggcagtttaattgccaaagctatggaagctgttgggagagaaggaacgattacagtttctgatggaaagactgtagagaatgaattggaagtagtggaaggactcaagtttgatcgtggctatatttcaccttattttgtgaccgatgcaaagacacagaaatgtgaatttgagaatcctctcattttatgtgtcgagaagaagatatcttcggtgaatgca

SEQ ID NO: 1044 - DNA, 339 bp, Cyanidium caldarium
  Clone ID: LIB190-020-Q1-E1-C12
aaaaaaaaaaaaaaaaaaaaaaaaaagaaaaaaaaaaaaaaaagaaaaaaacataagtacacataaataaaaagataaaaacactactaaaactaaaaaggggggtcgctccacaggttgaactcttacttacctttgaacggggaaacatcagctcttcacaaaggttacccaatttcctttcattggccgtttttttaaaacgctctgactggaaaaaccctgcggttatccaacttattccccttgccgcaattccccctttttccagcaggcgtaatatcaaagagccccaaacccttcgcccttcctaacatattcccaaccttaatgggaaaa

SEQ ID NO: 1045 - DNA, 409 bp, Cyanidium caldarium
  Clone ID: LIB190-020-Q1-E1-C2
acggacgcgtgggcgaggttcttatcgtggaatgaaaagagattcagaacaaggaggatatgacttggagcaagtagtagaacatgttgttcagtttgaagagcgttttggacgtcgaccacgtatcttagttgccaaaatgggacaagatggacacgatagaggtgccaaagttattgcttcaggatttgcagatttgggttttgatgtggatattggtcctttgttttcgactccggcagaagttgccaaacaagccattgaagcagatgttcattgcattggcgtttctagtttagcagctgcacatttgacactagttcctgaacttatggaagaactacgaaagcagtctgcaacacatatcaaagtcatcgttggtggagtcattccatatacagactatgac

SEQ ID NO: 1046 - DNA, 354 bp, Cyanidium caldarium
  unsure at all n locations
  Clone ID: LIB190-020-Q1-E1-C4
gttattttagcattctctgccactatcattggcttggatggacgtaaagcagacaacatatggaacgacagcttattctatgatgggaagtacattaacttttgtgcttattctgcctcttctgttgtagaaggaggggaccatggagcgtgtaaatatgtcatggcgttggcgtctataagtttgattctagtctttttcttgtggctttttacatttgtagatgcgttgtatcctattcttaccaagttttggtttattgaattgggtatcaacgtgtttcaaacaatgtggtggttggttggagcaattgttgtatctgcannaaggcctacaagctctgtactagacgct

SEQ ID NO: 1047 - DNA, 415 bp, Cyanidium caldarium
  unsure at all n locations
  Clone ID: LIB190-020-Q1-E1-C5
gtttcttagacaaagaaacccgtcattttattgggtgatttcaacgttgctcatgaagaaatagatgtgtatgctcccgaccgattgcgttccaaagctggctttgttgctagtgaacgtgaacatttttcccagtttttgaaagaaaccaacacgatcgatacatttcgttatttgtatcctcgacaaacacaagcatatacattctgggaatacaagacgggaggtagaattcgtaaccagggttggaggatcgattattggtaggaatgtagtcatatctttgttatatttttattttcgttttctagtttgatatcttgttctttggtggagcgtctgatggattccttcatattggacaaagtacaaggaagcgatcattgtccagtangaattcgattgttgtggagtg

SEQ ID NO: 1048 - DNA, 433 bp, Cyanidium caldarium
  unsure at all n locations
  Clone ID: LIB190-020-Q1-E1-C6
tttcctttgggctcttatcgattgcctgccttctctcgacactcgttggtttgtcctttgaaaacacgttttagacagattcaaatggctgcagtaacttttaagaaacagaatactgatgtacctggtattctatacggagaaaatgctcccaacaactttggagttattgttgtccaagagtggtggggtttgaacgaagtgatcaaaaaacgagcacaagagctgagcgatggtttgcaatgtaaagctcttttgccagatttttatcgaggaaaagtagccacccaaccagatgaagctcatcatatgatgaccaatttggactggcccggcgctatcgatgatattgcagctgcctgtcagtacttgaaggaatccaaacagtgcaagaaagtaggcattgtangatactgcatgggtggcgctattg

SEQ ID NO: 1049 - DNA, 409 bp, Cyanidium caldarium
  Clone ID: LIB190-020-Q1-E1-C8
gatgaattgtggcggcacttggtcgcatccaaagatgtccgctagtcgaacaccgagtgcgctatctacgggatttatttatagtttttcaaaagttactcgtactttgagtgtctttcacaatagtaaaagctgtttttcataccctcgtcattcggaaggactatgtgtcaagcctcgattattaaaggtccattttttggccaagcgttgtttttccagaaaacgaaagagccagactgacacgaaagcagtgttaaatgaaagtacgacacttcaaagcaaagagagcttacaagaatatggtgcaagtcaaatatctgtattgcaaggcctcgaaccagtgagaaagcgacctggcatgtatattggctccacgggtatacaaggattgcaccaacttgttttt

SEQ ID NO: 1050 - DNA, 56 bp, Cyanidium caldarium
  Clone ID: LIB190-020-Q1-E1-C9
cccacgcgtccgggagtacacccaagtaaaataaaaccggcttcttttggtggtgc

SEQ ID NO: 1051 - DNA, 343 bp, Cyanidium caldarium
  Clone ID: LIB190-020-Q1-E1-D1
cagggaagtatgacccagtaatgaggagtggagtaaacagaaaaggaagtaaaaggagggaatgaagggaagttatggcaaaaacacgtgccagcagcagcggtaaaacgtgtgtagcaagcgtagagcagaagaactgggtgtaaaggtcgagtagtagagtaagtgtaaaagggaaaggaaaggagagaaagaggaaagggatgaaatgcagagatctctagagaaaggcaagaaagaaaagaaaggaagacacagtaaatgaggcgagaaagcataggaagtgaaacggattaggaacccgtgtagtctatgcagtaaaagaaagaatgagtaagaaaaa

SEQ ID NO: 1052 - DNA, 413 bp, Cyanidium caldarium
  Clone ID: LIB190-020-Q1-E1-D10
attgaatctgctatcaacgtgtttttctgggcttggtggttggttggtgctatcgttgctactgcggcaagaccttctacgggaatgctgaacttgcacaacaacaggacggaagtaaacgcagtggaagccttgctttgggccaacatgtgcttgtacttcttcaatatcttcttggcctttttgatatactgggttggtgaaaccggtggttggattcctaccgttgcagactatcgcgtgttgacttctgtggagaaggatcaaactttgtccaaaggagcggagatgcatcaagaagagtctgcataaaggactagttttgtatagttgccatcatggacggtttgtgtggaaagttgtgattgtgtagagagtgtgtttgtgagttgtgtgtggtaatgttgttttac

SEQ ID NO: 1053 - DNA, 339 bp, Cyanidium caldarium
  Clone ID: LIB190-020-Q1-E1-D11
aacgctttggagtgtcgttgtgttgttgttggtgaggtgggaagcaagaagagatgagtagaggaagtagtgccggttatgatcgacatattactattttctctccagagggacgactatatcaagtagaatatgcctttaaggctgttaagtcagtaggaattaccaccgttgctgtaaaaggggctggatgcagtttgtggagtaactcaaaagaaagttccagattagctcattgaccctaaatcaatcaacaatgttttccgaataaccgattaccacgggtgtattttcactggacttgcaacggacgcaagggcacaactacaacgaacacca

SEQ ID NO: 1054 - DNA, 255 bp, Cyanidium caldarium
  Clone ID: LIB190-020-Q1-E1-D2
acacagacgtccgtgcaacaaggccgtaactacctatactcaaacctgctgtgcttatgcgcatgaaagttcctatgcactcagtaacgagcaatatgttcaggaaactgtgtctgctcaatatacttcatactaccgggaagcatccgccaactactattatcgatcagctgcgcctcagaaatggtataaagaagaatggcactcatagtgctggtttccaatacaggcctatgacacttatcaaggttctcc

SEQ ID NO: 1055 - DNA, 263 bp, Cyanidium caldarium
  Clone ID: LIB190-020-Q1-E1-D3
agatatctggtactcctcgatagctatattcgtaccgtatgcacgatatcataacgtttatgaagaacaatgaataacactagatgactattagcgagaaggtgtatattctatatggaaaatgcccattggccaatatgatgtatcaaatgttataaataagtaaaatgataataatatagggtatgcttagaagcaccaatccatagaggaaaacgtttaagcatgatcgataataactctcaaaaagaatatacacacgt

SEQ ID NO: 1056 - DNA, 375 bp, Cyanidium caldarium
  unsure at all n locations
  Clone ID: LIB190-020-Q1-E1-D4
cggacgcgtgggtgcaatccaatcccaacaatcgaaaccattgaggagagttgaggaacgatgaagtggcaaagcggtcctaggaatacaagttttaataggatacaaacgctactgcttttcttgttgattatttgcaacgtttttccatatagttactctatacaattttatatgaacgctggaacgaagcgttgtctttcggaagaaattacctcaaacacaaaggtgtttggtgaatgtcttgtantcggtgcggaaggctccatgtccgtagatctgttgattcgaggacctcaaggggagactatagtgcaacagaagaacatagataagcagtcatttagcttcacagcaccacagcacgttcttgct

SEQ ID NO: 1057 - DNA, 431 bp, Cyanidium caldarium
  unsure at all n locations
  Clone ID: LIB190-020-Q1-E1-D5
ggaacgacttgatcttgcggtggataccaatcctgagtctcttgcgctcatcgatgagttttatggtggatatgaagacatgtacaactttaaccagtttcaagtaggagttgaaacccgtgcaagaagtctgagaagccatgctgctttggaagaagaaagtgggaaaagtgaaggcgtcggtgctcttcgaaagcggccaggagagtgggatccttgggagagtatagaagtgacgtggattcaacccatcgatagaaacatggaagcattccggttccttagtccctgggagcgttatcctttacatcagcaaggaatcagttttgtttagcatccacttatttgtcgtccgcatatgaaagaagccaattcaggagtgcgcataggttccggacgcaatatgagagcaganactatgtcagcccgca

SEQ ID NO: 1058 - DNA, 437 bp, Cyanidium caldarium
  Clone ID: LIB190-020-Q1-E1-D7
gggaaacgcagcgattccatgttgaaagagggtacactatattgtccgatctcaagtttcaggtgcttcaagatggaaaaccccaggtgataacttcggatcaagtattcggaggaaagaaagtagtattgtttgggttacctggtgcctttactccaacctgctctaggcagcaccttccaggctttggacagaaggttgatgaaatcaaatcgaaaggagtagatacagtcgcttgtttagctgtcaatgacccttttgtattacatcagtgggcagagtcacagggagtggcaggaaaaattctcatgttagcagatggtggtgcgcaatctgtcaagaaacttggactggatatcgatactggtgactttggtggtattcgttgtcgtcgattctcaagcttgattgacaattatgtcgtgaaaaagcttcat

SEQ ID NO: 1059 - DNA, 423 bp, Cyanidium caldarium
  Clone ID: LIB190-020-Q1-E1-E1
accacgcgtccgaaggcttcaggtgtcgaccaaggcatcaatactgcaaccgaatttggtggtcaatttaaggtaactggatatcgtaccggattgtttttggatcccaaaggaagaggtggaacttcgggttatgatatggcagtagctcttccagcaaaggaagccgatggtgcagaaggtcaagaagacttgttgagagaaaataacaaaatatttgatgtgaccgatggttccatagagatggctgtcaacaagttggacccaagtactggagaaattgccggtgttttcgtttctgaacaactctcagatactgatatgggagcaaaagatccgaaaaaagtgttattgaaaggaatcttttatggtcgcgtggtggaagatgatgctgcatcggagtaataagaatggacaattttg

SEQ ID NO: 1060 - DNA, 407 bp, Cyanidium caldarium
  Clone ID: LIB190-020-Q1-E1-E10
cccacgcgtccggatttccagatgatatttatgatggctatactagtaacgttccaggaaatccgtggattctatgtactttaggaatggcgcaatattattatgagttggcagcagagtggttgaaacatgaaaagattgtcataggaaagtggagcaaagactttttcagacatttgagggttatgcctcctccttctcctcctcaatcttctatatcgacgaccattactggaaaagcgatttgtagttatgtttctgcgctattagaagaaggagatcgcgtattgaatgctattcgaaagcatacagttcctagtggtatgtttacagaggagattgatcgatatactggtttcgagcaaggagctatcaatttaacttggagttatgatgcctttgttact

SEQ ID NO: 1061 - DNA, 405 bp, Cyanidium caldarium
  Clone ID: LIB190-020-Q1-E1-E11
cggacgcgtggggtcctgcgacatggccaacttgaaacaacactttacaaagttgtttagaagaactagccaaccttccaatattcatagagcacagacaaccacagataggacaaatacaactcatataaccaacagaaataggcaacttgcaacagctcgtcgcatggctgttcaagaaaactatcctgagattccttacaaaatgttatttatatttgctctcttctgtttctcgttgattggattagtttcttatgggttatggtattcaggagcgccttggtccatagccgtcatacccctaatagccccaagcttcgggtttactatcctctttaccatgttttatatttcttccaaatatccgcctcccgtaagaaagacaactactaggcaaagaat

SEQ ID NO: 1062 - DNA, 297 bp, Cyanidium caldarium
  Clone ID: LIB190-020-Q1-E1-E2
aggatttataactgctgtgatttccaatgtggactttgtgactcgcaacatcacatgcaagtttaccatggtcgacttgaagaacgagaagacattgatagcgcataatacttatgcattgattactatcatatcgttctttatggaattgcgctttgcattagtcatggaaggctttcctcggttggcatctgcggttgctggagtatcgaaagccatgctatttgggagcatcatgttttgctccctattttaccatctttataacgaggtttcgtacctttgtctggataatgt

SEQ ID NO: 1063 - DNA, 393 bp, Cyanidium caldarium
  Clone ID: LIB190-020-Q1-E1-E3
cggacgcgtgggttcgtgatgaggttgcggacttggagaaggctggttgtaccatcgttcaaatggatgaacctgcgcttcgtgaaggtttgccattgaagaaggaacgttggaatgaatatttagattgggctgtgaaagcttttcgtcttagtacggtcgttgcagcacccaagacgcagattgtcacccatttatgttatagtgactttcaagatattctaaaagccatcgatgagatggatgccgacgtattaaccattgagaatagtcgtagtgatgatgccatgttgcgtgcccttgccaagtatggttattcacgtgatgtgggacctggagtctatgatgttcattcaccggctgtaccgagcatcgaatttttgaaaaagaaaa

SEQ ID NO: 1064 - DNA, 431 bp, Cyanidium caldarium
  Clone ID: LIB190-020-Q1-E1-E4
cacatttgtgccatttcttctctcgaacgcaactttcacgatggctgcttcctctaaagcgatatgtgttggtaaaaactatgaaaaacatgcccgtgaaatgggtgatatggccacttctcgtggagatcctatcatctttctaaaacctagttccagttatttgcatcaaggcagtcccatcttgttacccaaaggtgctcaagtacatcacgaagtggaattgggagtgattattggtggtgcaagtgctgttaggaacgtgagtgtgaaagatgctatgcagtatgtccaaggttatttgtgttgcttggatatgactgcgaggaactggcaatctactgctgcttccaaaggggagccttggacactggcaaaaggttgccatacttttctccctatgagtgaaggaatacccaaagatcgcattc

SEQ ID NO: 1065 - DNA, 402 bp, Cyanidium caldarium
  Clone ID: LIB190-020-Q1-E1-E5
cccacgcgtccgacgagacaagtgatatggaagatatattacaaagagaagaggttagaaaagcgttatggaatgccgttttgccagcaacgagacaggtggacccggtgttgtgggattcagtagtaaaagttgtggaggaaagaataatagaatatttaagaaactgtcctagacagcaagctaatatagaagactttgagacgaatattgtatttgaaaaggaaggtccaccagcaagtcttgaccaagttataaaatatttgctagagaggaaggagctggttccagtaggagtttttcaacttaagaatgttgccatttgtgataattcgacaaacgtagcatcgtttttagccagtgcattcaagtatcctttcgaactgctcaagcagacctgca

SEQ ID NO: 1066 - DNA, 425 bp, Cyanidium caldarium
  Clone ID: LIB190-020-Q1-E1-E6
cggacgcgtgggcttatgagcattcgtcgtctggaagacgtgatgggcgaaagtcttacgagatacgaggttttcgctgtgagttgggttatttagaacgtgcagatgggtcatgtaagttagaacaagggaaaacgcaggtcgttgcggcagtatatggtcatctcgaagtaagaaagtgatacttctaatagtacgcgtataagactttctcttggattaggccagaggaagaaccgaacttccggacaggacatttatagaagtttccattcgaccttgccaaggatatacatctgattatttgaggcttcgagaacgtgaactggaagaagtttttattgctaccgttgctactgagttacagccccgaagctgtgtggcaatcattcttcagattgtagaaaaccatggaagcctaatgt

SEQ ID NO: 1067 - DNA, 413 bp, Cyanidium caldarium
  Clone ID: LIB190-020-Q1-E1-E7
ggatagtctttttgcatgccttgccattttgaaccctgtatggagcctgaccctctcaaccacgaccacttagccaaatggcgaggttactatgctcctaatcgtcccagtcactacaagcgtattttagttacaggaggagccggtttcatcggttcccatctggtggaccgccttatggaagaagggaatgaagtaattgtactagacagtctttttactggaaagaagagcaacttttccaagtggttggataatccaaagtttgagtttgttcgtcacgatgttacttttccctatcaggcagaagtagaccagatttatcacctggcatgtccagcgtcaccagttcattacaaatacaacgctatcaaaacggtaaaaaccaacgtattggggactttgaaaatgtt

SEQ ID NO: 1068 - DNA, 406 bp, Cyanidium caldarium
  Clone ID: LIB190-020-Q1-E1-E8
cggacgcgtgggcggacgcgtgggcggacgcgtgggtgcctgggattattgaagcgatatgtggaggacttgccattggcttttccgtcgcggcaaatgctgttttgctcggaagagtaactggtattagtggcatcgttggtggtatccttgcgaaacagtcaggttttggatggagactatcttttcttggaggacttgcaggaggtggttgggtattaaggaagtttttgccgagtacagttcctatcgtatctggacttgtgtctcccctcagattggctcttgctggtgctttggttggctttggcactcgattaggaagtgggtgcactagtggccatggtgtatgtggactaggacggatgtcaaagaagtctctcgtgaatgtgctagtgtttatgac

SEQ ID NO: 1069 - DNA, 424 bp, Cyanidium caldarium
  Clone ID: LIB190-020-Q1-E1-E9
cggggtgttgtaatggcagcgtcttgcaccaaggacaaacaggaacctacgcaaagttggttcgctgccgatgaaagtaagcgttggtgtgagaaatttttgctcgttgtgactcctttgagcattgcttctttgattttgggattgatcggcagcggttggtacaagtattgtggaaaaaacgaatatttgctgttctcgctgctcatggcagcaccatgtttcgtctttccattgtttttctgttgcgacgaagacaaaaggagacctttttcgcagcgcttttgggtcaaggccaatttatggaattttattttcggatatatcggaaattatttttggacgcactatttctatcaactactcggagcacactatacttttgagtcctatcactggaataatgtaccgattccaatgttat

SEQ ID NO: 1070 - DNA, 384 bp, Cyanidium caldarium
  Clone ID: LIB190-020-Q1-E1-F1
gtaacaactatcagcaccactaaaagatggttcgtatgagtgtattagccgatgctttgaaatccatcgccaatgcagaaagaagaggaaagcgtcaagttctcatccgcccgagctccaaagtcatcatacgcttcttgcaggttatgcaaaaacacggatatattggagagtttgaatatgtggacgatcatcgctcgggcaaactcgtcgttcacttgataggcagattgaacaagtgcggtgtgatatcaccacgatatgacatgaaagtgcacgaagtagagcaatggatcaataacttgcttccaagtcgacaattcgggttcgtagttttgacgacatcgtatggtattatggaccacgaagaggcaagaagaaagc

SEQ ID NO: 1071 - DNA, 410 bp, Cyanidium caldarium
  unsure at all n locations
  Clone ID: LIB190-020-Q1-E1-F11
cccacgcgtccggacgatgattcgatgcggcacaagacagttgtggtggcaactgcgcgctcgttatcatacaactactactgtccatagagtagcagcagaagaagaaaaggaatcggtcggtataaagcccaaacgtttgcatcagcctcttggagtttatccacaaggaaccaatctggaagaagtgagagaaaagtggcaaagtgacgctatggaacttatctcgaaagtacctccgatagtagtcgatggctatgtcatagcgtgtaatggaggcggtggtccattaggacatccaatagaatatattcgtttggaagcaccttatccttcaacttgcaaatattgtggtttgcgatatatcancaaagacacttttgaaaagtggaaaaaggaaaataacgaat

SEQ ID NO: 1072 - DNA, 440 bp, Cyanidium caldarium
  Clone ID: LIB190-020-Q1-E1-F12
aggaaatacaggaaggagttggtttaggtatgaaagaattgaagcgaactctacagtctttagcttgcggtaagattcgggtactgaaaaaggagccaatgagtcgagaagtggaaaatgaggacaccttttatttcaacaaagactttcaagataagcgatatcggctcaaaattaatcaaattcaagtgaaagaaacaccggaagaaaatcagcagacgacagaacgtgttgtacaagatcgtcagtatcagattgacgcagctattgttcgcatcatgaaaacgagaaagtctctaacgcatagtcagttgatgtcggaactttatgagcagctcaagtttccctatcaaccggcagatttgaaaaagagaatcgagagtctcattgatagagagtatttagaacgagacgcagacactcctcagctgtatagatat

SEQ ID NO: 1073 - DNA, 144 bp, Cyanidium caldarium
  Clone ID: LIB190-020-Q1-E1-F2
gctatgtaaaggaacataagtcttacaagctttccgatggttctgtcgtgattccattgaacaatatcgcgattggcattgaaaccgatcctattgaataagaaaagcattgtttgttttgttcgagaaatggaatgagaaaga

SEQ ID NO: 1074 - DNA, 410 bp, Cyanidium caldarium
  Clone ID: LIB190-020-Q1-E1-F3
agagagagagatattccgcctatatcggtatatagatatacaatatgaggccgacgttagataaactagtgtcaatggttcgcaagtgtgtatctccgttaaaagcgttggtatattctactatccatcgtcgactgagaaggagagaatatcgacgggattggattgctcacatacaagctgctgctcgtggtcacggtgtacggtacgcaagatttgtgtacgttttatgaaataaccaaattctcctcaatcgtgaaatactgagcgaattggcaaagacagattcggcgacgagttctagtttattgacatggtgtgcaagtacaatcaacgttatcgatttaggaaataaagtataaaacagtgactagataatagttggactctttttccaaaagccaagggat

SEQ ID NO: 1075 - DNA, 377 bp, Cyanidium caldarium
  Clone ID: LIB190-020-Q1-E1-F4
cggacgcgtgggcttggctgccgaagttgtaagagcacatacggagttgctaatagcagaactttcggaacagttgatacaacgagctagtgctaccgattcttctgtcggaaacattttgaaacagtgtcaaacgctgtttcttttacatttgattgacaaacagtcgattttcttgcgttataattgcttatctcctccaaacgcacaaaagttgcatcgagtactagtcgaactttgtatgcaacttcaagagcaggcactgcctttggtggattcttttggaatagcacctcatctattagctcctattgcctttgattggatagaacataacagtcgtagtaaattgtaagttgttaattcgaacaagaaaa

SEQ ID NO: 1076 - DNA, 414 bp, Cyanidium caldarium
  Clone ID: LIB190-020-Q1-E1-F5
cccacgcgtccgatttggtgtttggggtctgaaaaggttgtgaaagtatccaagtagaaacaaataggctgggaaaatactactgagttgacagcaactctattttatgtctttttactccagctcttttctttcttcgctagacacggttgaagagtctagtaggggactgaagatagcaaggtctgcttcctcgggtcctttttcgatcgaggaagtgtctggtactggtaaatcactcgtcgggaagcagaagaggggggaatatttaagccaaagtctgaagccggaaatatttagaggagactcaacaagaacaactggatgctcagatgaggacttgtttgggaagaagccttgggtgaggccgcctctttctaagatttccattgtgtcctcatgggaagtaactga

SEQ ID NO: 1077 - DNA, 414 bp, Cyanidium caldarium
  Clone ID: LIB190-020-Q1-E1-F8
ggatgtgaatatgtggaaagcacaacaacgagagcgttggttttttgggagagagttttcggcacaagaggataggctggaagacgaccaaaaagggaatgaggaggaagacgacaaggacgatggtggtgatgtggactataaaaacttgcaacgacttgtgaaataaaatctttttggttgtgcaccaacatgttttttgtgtagaattggatagaaacaagtaggaggatggaagaaaacgtaatagattttccttgtccaagtgacgtagaggttgcactggaagttttatttcaagactttcctggattagacgtcccgggttttccttgttgtgcgttacagagccaagtacaagccctcgtgaaagacaatagcaaagtggagcctgaacttcgtcatttaataacc

SEQ ID NO: 1078 - DNA, 426 bp, Cyanidium caldarium
  Clone ID: LIB190-020-Q1-E1-F9
cccacgcgtccggagacttatagcgcttcatgtcagttgcatcttttgtttggcttactggtccaactgtcacacatgataataaggagactcgtaatacctgttgtgcacataccagatatggcttgggacgagtagtttcctttcggaatcataataggggaccttgcgtggaatcgagacgacccaaaacacaaggcaggctaaataacttgaccatgatgcccattggtgttcccaaggtagcttaccgtgttcctggtgctcctcaagcagattgggtagatatttacaatcgactctatcgcgaacgtattatattcttaggacaagagattgacgacgagatttcagaccagatcatagcagtaatgccctatttagactctgaagattataccaagcctatatatctttatatcaact

SEQ ID NO: 1079 - DNA, 380 bp, Cyanidium caldarium
  Clone ID: LIB190-020-Q1-E1-G11
cgaaactgtttgctaaactacccgctattctcggttttatccatatagccttctcggtataaggcttctggtgacgaattcgttggaggaaaactcgagtacaacagtacaaatgcaggaaaagaaagccttggatgaagctattcatttatggtggacgaatagtgagttttcttattaggcttgtattcattctacctttggtcgcacaagggttcgacagtggatcgtcgcggtgctgatacgggactgggttataaggatttattctgacaggtcggttttcagaaggagtgttgggcgttcgcatgtccatcaccgaaaacctaactcgccttaactttgactccagcaacgttaccaccacgagccgacgccct

SEQ ID NO: 1080 - DNA, 417 bp, Cyanidium caldarium
  Clone ID: LIB190-020-Q1-E1-G12
cccacgcgtccggagttgaattggtgggaacacgttgatctagatggcaagttgagaatttttttgacaccagcgcagcactggagtagaagaacaatttgggacactaatcaatgtttatggggaagtttcgccgtaattggtacttctgtaaagttttattttgctggagatacgggctattgtccagtattcaagacaataggaagatatttaggtccttttgactgtgctgctattccaataggtgcctaccatccaagatggtttatgtcgcctcaacacgttgatcccgagcaggcagttaagattcataacgatattgatagtcgtttttccatcggtgtacactggggtacatttattttgacaaacgaatactttctcgaacctcctcaacttctaaagaaagtcatg

SEQ ID NO: 1081 - DNA, 410 bp, Cyanidium caldarium
  unsure at all n locations
  Clone ID: LIB190-020-Q1-E1-G2
ggcaaatacgggaaagcagtaaaagaagaaagagaaaggaaaaaactgagtatcaggaagaaaagagggagtagatgaggaaagaaagatcaaggaagtaagagtaagagaaggagtaatgtgaatgaaagcaggaaagtatttgaagaagagagtgtaaagcgcgtaccttttgcataatgtcccagcgagtgaaagaggaagcaaaaagaaagaaaaagcccagaagccaagataaggtatcaaagtaaagaaagaaggaaaaggagaagaagagagggtaggcttagaagcagcaaaccagagaggaaagcgttaaagcatgaaagaaaagaaatccgaaaaagaagagaaaaaggtaagaaagaggaccgaatcagggtaagaggtanaggagcaagaagagaaga

SEQ ID NO: 1082 - DNA, 214 bp, Cyanidium caldarium
  Clone ID: LIB190-020-Q1-E1-G3
tgaactatttcaaagatgggaaacccccagagctaaaggttggtgaagtgttggtattctttgcaaacgactgtaaattgtggaaaaggatgacaaagaatatcctgagtggttgtttgctctcaagtctcgtcgagcaacgttggaagatcttgtagaaagggtaaacaagttatatgctcaaggaggtgtggatgcagttgcagaaaatgtt

SEQ ID NO: 1083 - DNA, 403 bp, Cyanidium caldarium
  Clone ID: LIB190-020-Q1-E1-G4
cccacgcgtccgcccacgcgtccgcccacgcgtccggcgaaacaagagaagggaagtaaaaggtaagaaagaggaaaggtttacgagagaaggaagtagaaagaagagagtgtaaggcggcgtcataatagaaatccgaaaggagtagaagaaaagagagagaagaaagaaaagaagagaaaagccgtactgaagaccgacacaggtactcgaggagaaaggagacccaaattaaggtgagagaatggacgataaggaactaggcaaaaggatatggtatctgcggtagaacatatgaaagaagcagcaccgactgtttagcaaaaacacagcactctgcagaaaagagaaaatgtaaagtatagagtgtgcggcctgccaaatagtagagaagaaatcgatg

SEQ ID NO: 1084 - DNA, 430 bp, Cyanidium caldarium
  Clone ID: LIB190-020-Q1-E1-G5
cccacgcgtccgtgattttgtcatgtcgtcttcaaatgagtctatcgagacgttattgctaaagacgtttcctaaagaaatccctacttcgtattgtctcgtgtatgcacttttggctattccagtactcgcgctcgacgtgtatttatatcttgccgtactccacttgaactttattgcttcaagcgtttcgttgatcatcggtactacagtcggcttggtgcttctagttacgtcgtatcataaaactgcatatgccaagtggtctaagctcgatcgcacaacagagcaaccaaccaagagctctttcaagggtaatttgtcggcataccgaagtggagttgagagtcacctatggctcctggaaagatcctcggtcagttacagtgtaatgataaacaacgcaatatttcaagccttcgtattcgtt

SEQ ID NO: 1085 - DNA, 344 bp, Cyanidium caldarium
  Clone ID: LIB190-020-Q1-E1-G7
ctggaaagttccaaggccagttggtgatttgtgttgttttggacaagaagatgaacggttctcaaaagacttacccaagaccaggagagagtggctgtcctgttactttcaaggctcagtatgagaactttattggtggaaagtgggtgccccctgtcaagggtcagtactttgacaacgtttcccctgtgaatggaaaggtgttctgcaaaagtgcgcgttcaacagctgaagatattgaactagctctggatgcggctcacgctgcaaaggataagtttggtgcaatgacttttgaacaaagggcgaagttgttgaacagaatggctgatgctattggacaa

SEQ ID NO: 1086 - DNA, 175 bp, Cyanidium caldarium
  Clone ID: LIB190-020-Q1-E1-G9
cccacgcgtccgattcgaattatcattaagacagatgcaaatgttaacggcgctcatattccaacattgttacttaccttcttttaacgctatcagcgtcctttggatgaacatggtcatttatatatagcgtgtcctccactgttcaagttttgaacaaggaaaacttgcaaat

SEQ ID NO: 1087 - DNA, 389 bp, Cyanidium caldarium
  Clone ID: LIB190-020-Q1-E1-H1
cccacgcgtccggtccttgtgtccatcctcccaacttgacgacaatgtgcttggtgcaacactatatcgatgaaaacggtatttcctattacggctttgacgctttttggaggtggctactagacggttgtccaaaaaggcctagtgaagaggaagtactgcgtcgaagtcgcaagtctggtcagtttgggccacgttccagtgctgcttccacacaacaagggagagctccaagtacagatatgagcgcttggaacgccatggcagaggactactatcctcgaagaaagaatcagcgagcaacggatcgagtggagatggtaccgaacttgcagaaacccgggacggagcatcagcaaccgttgttgaatcaaggtgacgaaaacgtt

SEQ ID NO: 1088 - DNA, 411 bp, Cyanidium caldarium
  Clone ID: LIB190-020-Q1-E1-H10
gcgtcggcatatgaaaatcatggtagacactaagcttaaggacggtgctagtgctgctctttggacttgccgcctatttctctatacagttgtgttagcattttcagcaacaataattggacttgatggaaggaaggcagataacatatggaacgatgccctatattatcatggaaaagtggtgaacttttgtgcatattcggcttcgtctgtttttgaaggtggcgaccatggcgcatgtaaatatgtgatggctttggcttctatcagcttgattttagttttctttctttggttggcctcctttgtcgacgcattgtatccaattcttacaaagttctggtttgtggagcttggtatcaacatattccttactatgtggtggttggttggtgcaattgtggtgactgc

SEQ ID NO: 1089 - DNA, 412 bp, Cyanidium caldarium
  Clone ID: LIB190-020-Q1-E1-H2
attgaactattgttggtgttttcaaagttgtctataacaacatgtcagacaaaccagccattgttttggacaacggttcaggaaactgtaaatgtggtatagcaggagaggactctccaaaggcagtatttccggctattatagggaaacccaagcaagccggagttatggttggaatggggcaaaaggaagaatatgttggagacgctgccatgtctaggagaggcattctcacaatcaaatatccaatcgagcatggaattgtaactaactgggacgacatggctaaaatttggcatcatgccttttacaatgaacttcgagtaaacccagaagagcatccagtgcttttgacagaagcccctttgaatccaaaagcaaacagagaacgaatgactcaaataatgttcca

SEQ ID NO: 1090 - DNA, 247 bp, Cyanidium caldarium
  Clone ID: LIB190-020-Q1-E1-H3
gcccaagttacgaagaactatgaatgaatgccacgatacaagtttcatcagccagagaaagtatacaagaatttcgtaaacttcgccagggagttggagaactatgcataagaaatagcgatagtctaacggtgagtcagctcacgtcacgaaagaagcgcgttcgtttcggtagatcagccatacatggatggggtctttatgccatgcaagatatcgagcctaatgagtttatcatcgaatatgt

SEQ ID NO: 1091 - DNA, 384 bp, Cyanidium caldarium
  Clone ID: LIB190-020-Q1-E1-H4
cccacgcgtccgaagagagtggatagagagtaaggaaaagatagggaatgtaatggtaataagtaaggtaatgtatggagaaaagatgataggaataatggaatgtggaatgatgttaatgttagcaatgatagcagtaataatgatggtggaaggagaatagagaaagaaggaggatgtaagggagcaggagttaagaagatgggaggaagtgataagaagaaatgaatgaggattcaagtagagcaggagaactacgcataaaaaatagccatggtctaacggtgagtcatttcaagtcacgacgagaagcgcgttccgtttcggtaaatcagccaataactggatgggcgtcttaaagcaaaacaggggggcccccccaaa

SEQ ID NO: 1092 - DNA, 382 bp, Cyanidium caldarium
  Clone ID: LIB190-020-Q1-E1-H5
gaagaccgacacatgtactcgaggagaacggagacccaaattaaggtgagagaatggacgataaggaactaggcaaaaggatatggtatctgcggtagaacatatgaaagaagcagcaccgactgtttagcaaaaccacagcactctgcataagagagatgatgtaacgtatatagtgtgcggtctgccacatagtagagaataaatcgatgatagtgaaagcgagtagtatatgaagtatagagaatggcggtcctaacagtaaggatccaaaggtagcgaattaaatacacgtttgaaaggcgtccagtatgaaaggagaaacgagtgtatcactgtctagtcgtccaactcagcgaaacagcaataactggtaaaatgc

SEQ ID NO: 1093 - DNA, 411 bp, Cyanidium caldarium
  Clone ID: LIB190-020-Q1-E1-H6
aagtgatattatcaaccaaggccgaactatggaggcatttgggttgtctccttcttatacgatagatgaagaaacgcgagacctggaaattttcgtatttacttcctatcaggacgttatctctttagagaaagtagtcgttactgtagagaagcctcgtgtagtttctgtgcgtgtgaaccctaacaatcccatttctctttctagtgtcaaaactgcatcgctacaattgcattttgtttgtttgaatgacggtacgtagtggacgatatatatatatatacatcggctttgtgagattgagttggatgtaggggagtctcttgtagtgataactttatcttttctgtaccgaccacttgaattttcattggtgaagaaatgtcgaaagccacagttgagacgtgccca

SEQ ID NO: 1094 - DNA, 400 bp, Cyanidium caldarium
  unsure at all n locations
  Clone ID: LIB190-020-Q1-E1-H7
agcaaggagaggcagagataaccctcgaagaaggactccctcacgagactgtgacatcttcacaagagacaaaagatgaaggcccggaaacaaagccaaaccgctttgcaattactggccacacagaggaggaaatggatacagagctaagcaagcttgatgacgagaacaaccggctgcacaagaaaagattacttacttccacggtctttggtaaccctaaacattttatatgggtccttgcatcgtttgcgagcatgggaggaattctgtatggtattgaccagtctttgataagtggtgctggtatttatatgccagttgacctacacattgaccagaatagagaagacatggttactggatttatgccactccgtggagtanttggtgccttaat

SEQ ID NO: 1095 - DNA, 366 bp, Cyanidium caldarium
  Clone ID: LIB190-020-Q1-E1-H8
agaaaatcgtgctgcaaatttatattcttcgcctcacacaaaagtgaaagatagaagaaattcttctcgatcggatgcttgatagtacctggatagagatgttctcttaagattcgtggtatctttcaaacaaactcgaaacgaaatcgacggcaaatcaaggtatacgaaagaacgtagatagaagagataaaggatctacatccaataatatttgttgtcgtcgaattgcttggcaatggacaaggtctacttgtaccgattctcaacccaaagctttaaataattgaagaaaattgtaaaatgcgttccctttttgaacgaagtggtgtacaactgatcttgacatttgttctctataagctc

SEQ ID NO: 1096 - DNA, 432 bp, Cyanidium caldarium
  Clone ID: LIB190-020-Q1-E1-H9
cccacgcgtccgcattgaaaatcatggtagacactaagcttaaggacggtgctagtgctgctctttggacttgccgcctatttctctatacagttgtgttagcattttcagcaacaataattggacttgatggaaggaaggcagataacatatggaacgatgccctatattatcatggaaaagtggtgaacttttgtgcatattcggcttcgtctgtttttgaaggtggcgaccatggcgcatgtaaatatgtgatggctttggcttctatcagcttgattttagttttctttctttggttggcctcctttgtcgacgcattgtatccaattcttacaaagttctggtttgtggagcttggtatcaacatattccttactatgtggtggttggttggtgcaattgtggtgactgcaaagcgaccttctagtg

SEQ ID NO: 1097 - DNA, 438 bp, Cyanidium caldarium
  unsure at all n locations
  Clone ID: LIB190-021-Q1-E1-A10
gcggcattcgacgacgccttcgagctggagcagcgttgagtaatttctgaaacacaaatatgcgtgccaagtggaaaaagaagagaacacgacgcttgaagcgcaagagaagaaagatgagacagcgttccaagtaacggaagaagcctcggacgtctgagttgaatagagttcctaaaacgtgggaaaactctttttgcaactctggcgcagtgattatatcctgctacggaaggttgaaagtgtttccgaggattgtccgcaagttatgataaaaggttcttgtggtttttgttttcaacttgtaaatgccacttgtcagtcataaaaaaaaaaaaaaaaaaaaaaaaaaaaaaaaaaaaaaaaaaaaaaaaaaaaaaataaaaaaaaaanaaaananaaaaaaaaaaaaaaagggggggcggcccaaagggttca

SEQ ID NO: 1098 - DNA, 388 bp, Cyanidium caldarium
  Clone ID: LIB190-021-Q1-E1-A12
caaggataaaagaaacacgttttctgataacaaaactaaatcacaatcatcatttggaaaatttgaaaaaggtctggcgcactataggttgattgctcaattcatcatgcttgctatgtcagaaactcttcgatatagacagacaaatgcaattcattggcagtccttataggccgtcttttcagtgaaaaccctggtcgtacacgtccttactctccgtgcctatacatccacctttcacaaattgggtcttttgcaaatgtgcacacaactgttgtcctgccccacatctgaaatgccctaattgccactagtacccattctctcaaggcactttatggctatcagcacctatgtttactctctgcttctcatcgctctgtgcaaa

SEQ ID NO: 1099 - DNA, 408 bp, Cyanidium caldarium
  Clone ID: LIB190-021-Q1-E1-A2
gggagaaattccctgagttgcgccatgtcgagtcgttggagcaaagtgacagcagaagagtgcatctttcttatatgcgatgttcaagaaagattccgctcagttatttatcagtaccccagtgttatccatgctgcgaagatattgttggaagcagctgaactattcaagatacctgtgatagccacagaacagtatccccgtgctttaggacatacagtggaggaattggattgtcaaaagatgaaagtgtatgagaagactgtgttcagtatgatggtacctgaagtagagaaaaacctcttggaacactcgttgagaagaactgctgttattgtgggaatagaaacacatgtctgtgtattgcaaaccactttggacttgttggaaaagggttattcagtgcac

SEQ ID NO: 1100 - DNA, 435 bp, Cyanidium caldarium
  Clone ID: LIB190-021-Q1-E1-A3
aggtaccagtctagcattcccgggcccaacctacgcgaaaaatcaccaaggggaaatcaatttcccaacccgggaatccaaatgggcccttttggcccaacatttaacccataaaaagagttaactcggtggtatgccacacctttgaaaacggcagaaaacggggaaccaaattttgatgatttggtaaaaaatgctgaaaagatacaggcaagattcaggaaaattaaccacttaactattcaagaaggtcaaagacttgtaaaaccaggtttgaaagaacttattgcaaatagacaccccgagccgtatataccaccttttgctcccggaggaacagcatatcagagaaacgttccttgtcctccagaggatgtgaacgatctactaccacctccggagagacgcattcggtagaaaggagccatcctactt

SEQ ID NO: 1101 - DNA, 406 bp, Cyanidium caldarium
  Clone ID: LIB190-021-Q1-E1-A5
ctccattgactacaaagggtgtggaaccaacccctcaagcgtggtggagagacgagctagataaaaccaaaaaagatatgggaggattctttccggtgttgttttcttttgcggttggtactggagttggtgtgtatgtggcacaaaactatcgcgttccgaacgtgcagtggtggttgcaacaaaccacggatattgtgaggagaatggaaagacaagcacgcaagtctcaagaggaaaaatagtgaaagaagaatgttttttttggcgccttgtggagaagaaacaaagctattgctggggaatgaatccatatccaattatttatagatatatatacatatatatgtagcacggttatttgtggtttccaattctttggaaataaaaatgctgtagttggaat

SEQ ID NO: 1102 - DNA, 335 bp, Cyanidium caldarium
  Clone ID: LIB190-021-Q1-E1-A6
gcgttgtgatcgagatgtccatggaactcgcaatatctcgctgcgcttcatgagcgaataaatggaaattattttatcggtaaaaaaaaaaaaaaaaaaaaaaaaaaaaaaaaaaaaaaaaaaaaaaaaaaaaaaaaaaaaaaaaaaaaaaaaaaaaataaaaaaaaaaatacagacaaaaaaaaaaacaaaacagatataaataatgaaaatacaataaaaaaaataataattctaaataggacaaaatatttaaataagaatgtacttactgaatcctagcagaaacgaaacatatatatcattaacgaatgaaacaaaaatcaaatatttag

SEQ ID NO: 1103 - DNA, 406 bp, Cyanidium caldarium
  Clone ID: LIB190-021-Q1-E1-A7
gttgcaaagaagaaaacatgtcaaagtttgccttgcctgcattgccttatgactacagtgccttggaaccacatatcgacactatgactatgaacgtacatcacaagggccatcaccaaacttatgtcaacaatttgaatggtgccatacaaggggaacatgggggtcagttcaagggtctctccatcgaaaacatccagaggaatgctgcaaaggcacctgatgctatcaaggcagctgtgagaaataatggcggtggtcactacaatcattccttgttttggacactcatggcacccacaggatctgcaaatagtgcacctcacggtgagttgaaacaagctttggaagcagagtttggttctgtggatgagtttaaaaacaagttcaatgcagcagctgccgg

SEQ ID NO: 1104 - DNA, 403 bp, Cyanidium caldarium
  Clone ID: LIB190-021-Q1-E1-A8
caaagaacaactcgtctcggtgttaaaagagtacaagcatattcaatatttaaaagaaaagataagacagagacaagctacttcatttgaccacgataatccacaacatgaagaaacgctgttcaagttgtgggatttgttacttgtttcatctccttcaccctgcagtagaaagagtgaggagtggaaaaaacttggtttccagggattggatccttgtacagactttagaggaggtggtttactggcattgcagcaacttgtatattttgcagaaacgagaagagagttggctttacaaatgttgaaagaagcgagtgacagttatccttttgcttgtgttggtattcattgtaccgcagctattgtgcaacttgtccatgaagactatttggatatattg

SEQ ID NO: 1105 - DNA, 275 bp, Cyanidium caldarium
  unsure at all n locations
  Clone ID: LIB190-021-Q1-E1-A9
ggttctagtgttttctttgttttgtgtgtccttgttttctttgcgttatgcatgataattacttgatatctaatgtcgtcacgtgagatatagtgttacacgtttgtatcgtgagcatanacaacaggtaattcctaaaaaaaggaaaactttcaatcataaaccgaaaaaaaaatttattcaagttaactcaaggagaatatatttcaccggaaatacctgaaacaacaataatgcctcaaagtgggtgtcttcccaaaaggttccatttatag

SEQ ID NO: 1106 - DNA, 426 bp, Cyanidium caldarium
  Clone ID: LIB190-021-Q1-E1-B1
ggccaaccaagcgtccgggaagggggagttacaactaacctcccggcaacagactcaagttcgaaatgtggggggaaggtatctgggagagaatccaaaacaggaacaattactcgaaaagcctaaagaagatacaatatcccaccaaaatttgtacgagataactcgtttggggcccaaagatgctcttccaccgttttggtcccttgtggcaagtagcacgtggaaactgccacctcccaagtgtccatatgacaattatcaacgtcctgcaatactagacaaaagactagaagctcttcgtgagcgtcatgaaagaaagcagtatagggaactaatacaggacttacctagtcttgcgccaagcgaaccatcaacctctgcctcttttaagtcatttagggaacagttgacacttggcttgca

SEQ ID NO: 1107 - DNA, 432 bp, Cyanidium caldarium
  Clone ID: LIB190-021-Q1-E1-B12
cccacgcgtccgcccacgcgtccgcccacgcgtccgcccacgcgtccgaaacaagatagaagaagagtatatcaaactattacagaagctttcgatgaaaccaaccatcaagctcaagcctttgagtttcatgtgaaattattggagacgtttaacggcgaaaacgaagatatgttgtcgagcatagagccatatgcagtgaaggcttgtaaggaagctattcgacagccgaaattgtttcgttttgatgaacttttggatttggacgccattcaaaggttgaagaataccaaagagcacgcgttgcttttcgagttgttacaaatattcgtttctgacaagttggaagcttttgtggattatgtggctcgcaatcgagagtattttgatcgagcaggtttcgattatgaagcttgtttgaacaagatgcga

SEQ ID NO: 1108 - DNA, 400 bp, Cyanidium caldarium
  Clone ID: LIB190-021-Q1-E1-B5
cagatctatcatcatacgttcaggttgataccacggttgaagtctccacatcttgcatctctctcacataccatctttctatcatggcccaactcgatgcattctatccattgctgttgtgtggcttcctagattcacgtgttgaatggaaagagcctgtttgccattaaagacaacagcggaggtgcattgcccatttattggttggagatccaagcgtcgtgttctgccaacgtataacggatatgcgtccatagcacctatatatcgcacttgcagctacaatgtatgcaatgtactgaacaaacggggtggattgcagtcgatcctttgcaggaaacgacaagagtgaaaagtgggatttgtcacgtattgtttcactggtcactatgtaaaagac

SEQ ID NO: 1109 - DNA, 405 bp, Cyanidium caldarium
  Clone ID: LIB190-021-Q1-E1-B6
ttcagagtttctagacaataacgccggccattgtaatacaaaatatggaactgctgcggtcgtaaatttgtttcgacaatatgtcagactcggataggacccaatataaagaacaagcttgctcctcggaagagaggaatccacgaaagaaacgtgctcctcgaggagaatttgataggcaagtagaggcagttcgtaaagaaatgcaagcaatcaaagagtcactggaagaaacggagaggaaacttcaagaggcagagaggcttcgtaatttacatggctcagagtccaaagaagaagaaggtgacgcgcaacagacaggcacttcttcagaagagttgaaacgttgaccgttgctagttgtgtttttttggcaaagtcagaagagacacgaatcttgtcttt

SEQ ID NO: 1110 - DNA, 376 bp, Cyanidium caldarium
  Clone ID: LIB190-021-Q1-E1-B7
acggacgcgtgggatgcacaggaaattaaactttacagacctgaaagtggttgaccctgctttcaaaaggggaccaactcttagaatcttaagaaatgttattattttgtcggtttttgatttaagggcgcttgtatttcatgaaaaggtacaaatatttgacccggaaaaccttcaatgttcccaagtttcagagcagcttacaacaagtctgcagtcagctccaaagtctggcagcaattttatttttgaactgtttgtgttagacacgcttctgaccttggtaagcaaacaagctaccgatccttttgaaactttatagcgttcgactcttcaaatgttcaatagaacccccagaatgaatgtggctcagtat

SEQ ID NO: 1111 - DNA, 406 bp, Cyanidium caldarium
  Clone ID: LIB190-021-Q1-E1-B8
cccacgcgtccgcccacgcgtccgcccacgcgtccgcgacaatatggtcaacgcttggatgggcgctgcactaggcttggcagcacaactgcttaccaacggttcaagactacttcccctttctcggcgtccttgggaacacttggctgcgatggcactcggtgcttacatcggcaaaatatggggagaataccaacatgacaagattgaaagaaaggagtatcgtatgaagagagatcttgaacgtgcaagaagagaaaatcaaatgcgccttgaacaagttgcagcagagaacggagcttgaggagttgtgtatgtatgaaaacaagcctcgtgaaccaacaacttgtcgtgggtatattttatatattgatatcaataataaacacacaacttgggtgtactt

SEQ ID NO: 1112 - DNA, 438 bp, Cyanidium caldarium
  Clone ID: LIB190-021-Q1-E1-B9
ggggatactaaactttggcaaataccaaacagcctttattcgaaagtccaacaaagcaatttgacttgtcctcactacaaaagactttcttttgtattggtccggtttgtttaagaagtggctatggattaggtttgggaattggctgtgggctgggctttggtcgtgggtttgctttgatggacctgtctagtcaaggtgtcggtagcaccggtggtattcctacgcagttcttgtatggtttgccttttggacattacgtttctgggtttttgcagaacttagcccgaaaatttcctggaagttcaacaggtattggctgtggttttggtttgggctatggtgttggaattggtctacagtatggagcaggtggtcggctttcttttggaaataggggacatttatataattttgggtcgactcactttgaaagac

SEQ ID NO: 1113 - DNA, 422 bp, Cyanidium caldarium
  Clone ID: LIB190-021-Q1-E1-C1
cggggccaaccaagcctccggggggccttcaaccccggtaaatgcggtaaacaaaagggccaatgaggttatacaaagtgcaaatagagaaaaatctgaatatgacgaaaaactttccgctttgcgacactatgtcttgaaaaacagttttccttcaagtgcgagtgactatgatgaacatagttgctctcttcgtggtacagtatggaaaagtctcatgggagtgggaaagttagatgaaggagaatatgaaagtcttgttctcaaaggtccctccaaggaacatctgcgtattcgagaggatgctttgcgaacttttcgtcatgatactgagtttcaattgcgagttcctgaggataagttggttcgagtattaagtgcctttgtacactggagtgaaggaactcctttttattatcgag

SEQ ID NO: 1114 - DNA, 453 bp, Cyanidium caldarium
  Clone ID: LIB190-021-Q1-E1-C11
atggattccaggatgtgaataactccacttgtaacactgtcccaacataaagaagtagaaaaagatcacagaggctagccaacccatggagagaacctgcaaggacgccaatcaacaatccgactcagcatgaaagcccattcccatgccatcaattaggcgccttgggatccacgggacaattcgatcgttcgattggacgtctatttgagatagtctagaagttgcctagacggaactcaggaagttgttccctaggtagaaaacacggaaaagccagaaacaaaacggaagactacttgtatagaatagaaacttttcaaagtagaagtagcgaaagatttaggcaaccgtcaatttgcagagttgtaagaaccttcttacgctcgtaacttatgctttacaagaccagattgtttagaaacattcttacgcacagaacgcttgttattc

SEQ ID NO: 1115 - DNA, 433 bp, Cyanidium caldarium
  Clone ID: LIB190-021-Q1-E1-C12
ggtgtcgtcgcactgcagagatggaaagactatcgcctgtgttttcaaccaacaagtcatccaataaagaagtagagcactggatgaacagtttaaaagaagtggagcaagtgcttgatgctgtggaaccaaagttgacgtcctcagggaccaagtggagagtggtagctcagcatatcaaggatatttgtggagaccttaatcaaatctttaacaaagaagaccctcgttatgaagtggttcaggcaggagcgagtgcagcacacgactttgacgtcagatatttggacattcacaagcacggaagagaagtttctcgacttttggagaaaatgcaaaagtatcgtcaagaaatcgaagaaatcaaaaaagagtacaaagagtcagacaagtatagagaaagatacgaccactacaaagtgaagctggacaa

SEQ ID NO: 1116 - DNA, 404 bp, Cyanidium caldarium
  Clone ID: LIB190-021-Q1-E1-C2
cccacgcgtccgaaaagatctcttggaaatgtgtgcaggtgttcaagatcctttaaaaggtctctttcttcgtggatattttacccaaatattgcgaagtaaactttcagatacggaatcgggtctaactactacggaagcagtcgaatttctattgtggaactttgaagaagccaatagactgtggattagaatgcaatatgaagtcaataaggaacgtttaagaagaagcgaggaaagaagacaagtagaaactttggttggattgaatatttccacaattgcacatttaaatgatttgacggtatctttatattccagtgtcatatttcctgccatttcacaacaaatttgttcctgtcacgatccaatggcacaagaatatttggcagattgtgttgttc

SEQ ID NO: 1117 - DNA, 250 bp, Cyanidium caldarium
  Clone ID: LIB190-021-Q1-E1-C3
gaatctaactgagtaaggaaaataagcttaacctattttggctggggaagtaaagcctaagaaagagtaaattaggcaagcaaaggcatgagagaagtataatagcagaagcatgcttgaagaaaaagaaagagatttcagaaagggaagaaaagtcagctatagagaacaggtgaaggagaactcaaaaagaggagagcaccgaacgatctaagaagaaactttgggggtaacaggttaatgtggtgtt

SEQ ID NO: 1118 - DNA, 398 bp, Cyanidium caldarium
  Clone ID: LIB190-021-Q1-E1-C5
agattccatatgttatggccaagtcttgcacttattccgttctccttccgacagacaccgagagggacaatttacattatatcctgtatttcataaacacagcatttgactcagtggcataatcgtacgaagtcgtcgttgtggatgacactattcccgatggaaccttggacgtggcaaagaaacttcaacaaatatttggcaccgaaagagtggttttggcgccgcgtcaagtaaaactgggtttgggctctgcagatgttcatggccttcagttcgcaaaaggaagctttataatcatactggatgctgatctatcacatcatcccaaatacatacgacaatttatttataagcaacgagaatgcaattttgatatcttgactgggacgaggtat

SEQ ID NO: 1119 - DNA, 405 bp, Cyanidium caldarium
  Clone ID: LIB190-021-Q1-E1-C6
gacgatggacaaccaacggcgttggaagaaattgcggatgtcgtaaaacaagcgtatgagcaatatttaggggagatattggtggacagtgctatttatcaagtcacttatgacataagtgtttctttacaagatgtgttgagcaccatccagcatttgaatgtaccgaatttgtccacatcggcaggtactcgagtatttaccgcgagtgaatatatcaaagctataggctatctccgaggcaatgtgagccatgctattcacaaaactccgcacatcatcgtgcaaacctattattcaccgttgaatccatccaaccaaaacaatcttccgcaatgcccagatatggctggtttggtcaacaacagcaacaaacatagtggaaatcaaacaactgttggaaca

SEQ ID NO: 1120 - DNA, 399 bp, Cyanidium caldarium
  Clone ID: LIB190-021-Q1-E1-C7
gctcgcagcgtccttgccgggggttttgtaccacggaacacaaggggacggaaccttttatgggaaggaacagatgttgcaaccaaataacgggcctggatcggagcgacgcgatacagcttcacatatgggttcttctggatatttttcgagtggagtgccaacagcagaaggctactgtgaacctatgaggttttcgcaactcacaccctcgacttggccgggattaaaaccccagtttggcaacgtagcaggagcgccctctagtctgccaaatacttcaactattcctcctcagtggtcagcctttcttggtcgggtttcagatgagaatccacctgctgtttcttttgactcgagtgacccatcgggaagggataagttaatttacgacctaga

SEQ ID NO: 1121 - DNA, 406 bp, Cyanidium caldarium
  Clone ID: LIB190-021-Q1-E1-C8
cccacgcgtccgcccacgcgtccgcccacgcgtccggctgtccattttctgggatgtcgtcgcaacccgtcttagtgctttgcgacttccaaaatgatattatgggtttcgttccccctgagaagaaggaagccgtcattaaaggagcttcgaaacttttgaactttgcccgtgagaagaagatccctgtagttcatgtgggagtacgttttagaccgggacaccctgaagtttcgaaacgaaacaagatgttttctcttgtttcctccagaggccccatccttgtggaaggtactcctggaagtgaccacgtagcagagttgaaaccaattgaaggtgaattcagtgttacaaaaagaagagttggagcacattataataccgatcttacaaccattcttagcgg

SEQ ID NO: 1122 - DNA, 414 bp, Cyanidium caldarium
  Clone ID: LIB190-021-Q1-E1-D10
ggtggcaatacattgtggtcgtgttttggtatgaaaagttgtttgcaagaagaaaatattcaaccaaacaacgcaacacttgttactaccaatggttgtcctcatgaaaataatatactgaccaaagagatacgctgggctatacagaccataattgcgctgataacttgccaatggaattcggtacaacaaccagttgtgttgtattgttgtaatatacaaaatccgcatatttgttttacggatggatttttatgtctatcttgtgtctatcttgtgtgtagagaagaaagccacgtgtcggaacactacaagttttcaggtcatagcgtatatttcgatatgagctttatgaaaatatattgttgtcgttgcaaagcatatttagcggatcatttatcttcctatattatt

SEQ ID NO: 1123 - DNA, 348 bp, Cyanidium caldarium
  Clone ID: LIB190-021-Q1-E1-D5
gtggatcgcagccatgcgaaaccttaccgaagaggaactccacgcagtgtttgaaaagcttgcaaaatttattggaaaagatatccagacattggtacaaggacctttggaagattgttgttttcggttacaaaaggatagagtgttttatgtaagagaagctatagctgctgctgcaaccagtatagctagagataatttagcaagtttgggtttatgtgttggaaagtttacccatagtggtagatttcaagtgcatatcacttttttaccatatttggcgccgtttgcaaagtataaagtttggttaaagcctcagtctgaaatgtcatttttgtatggcaacca

SEQ ID NO: 1124 - DNA, 371 bp, Cyanidium caldarium
  Clone ID: LIB190-021-Q1-E1-D7
cccacgcgtccgatcaacatttgaatgcatttgatcgcgaaatgcatcatttggagagtcgacatgcgttctgtaggcctcatttgcatcaatggataatgatacagcacaatcaagacaaagtaattgcctttgaaaaaggagatggtttgctaattgtacttaattttcatccggtgaaatcctttttcgactataccgtgggagtgttgttgccaggaaaatatgttcttcaattggattcggacagcctgaattttgggaggatttgatcccatagaataaaatgtggagcattttactcgttcctgtaaaacatcatgattgtcctcattcactccaactctatttgcccaatcgttcctgtcaag

SEQ ID NO: 1125 - DNA, 411 bp, Cyanidium caldarium
  Clone ID: LIB190-021-Q1-E1-D8
gaaagaagagagtgtaaggcggcgtcataatagaaatccgaaaggagtagaagaaaagagagagaagaaagaaaagaagagaaaagccgtactgaagaccgacacaggtactcgaggagaaaggagacccaaattaaggtgagagaatggacgataaggaactaggcaaaaggatatggtatctgcggtagaacatatgaaagaagcagcaccgactgtttagcaaaaacacagcactctgcagaaaagagaaaatgtaaagtatagagtgtgcggcctgccaaatagtagagaagaaatcgatgaaagtgaaagcgagtaaaagatgaggtatagagaatggcggtcctaactgtaaggatccaaaggtagcgaagtaaatagacgtttgaaaggcgtccagtatgaaag

SEQ ID NO: 1126 - DNA, 428 bp, Cyanidium caldarium
  Clone ID: LIB190-021-Q1-E1-E11
cccacgcgtccggggagattgaaagatcatctcgtggttccatgacattgcaacgagcagtgcaacaggttatcaatcaaaaatggttaactactggcaaaatgactcaaaccaatacttggaaagaatattgtcagtatgcattacaaagcggtagtgcattgttgcgtgatagctccctcgactttcctgaatatagcaaaagtctttcatggctcatgcgtattcgtgttggtggttggagttcctgctcgaggctcgccagaatcggtatattggatgaacaatggaagactcgttgtccttgttgtttggtcaatgtacctgaaacattgagtcatttacagcaaaaaacgtccgttactctcatgctcaacctaatcgcagctgcacacccaagaaaccaatcaattgccaacaattacagt

SEQ ID NO: 1127 - DNA, 440 bp, Cyanidium caldarium
  Clone ID: LIB190-021-Q1-E1-E12
tgcatgttgtggccaaagctttccaagttggctcctaaaaaggaatggcaaaaagcctactcctatttattcactttaactggaatggcaacactgtggaatacaaaggtttactgtgaaaacagttctacgagtctacaagaagtagaaagtgactttcgagtaagaaaggccattctacagtcccgagcaaaagccttgtatcaacaaatcaggtgtttagagtgtggaaatggtcaaactattgaatattctggagctcctactgcaaatgaaatgagacaactaatatgggatttgctagtagaaggtcactctgaagaagatatcaaaggtgttatcgaagtgaaatatggccacaaggtttggatgactccgccactcgatacacgtcgtcttttcgattttagtttgcctttcttcggagtagctgtttgtat

SEQ ID NO: 1128 - DNA, 388 bp, Cyanidium caldarium
  Clone ID: LIB190-021-Q1-E1-E3
aaagaaaacctttaagcaataaaggaaagaaatcccaaaaaggataagaaaagggagaaaaaaggaccgaatcagggtaagaggtacaggagcaagaagagaagagagaatgctgggtggagtagcgaaacaagagaagggaagtaaaaggtaagaaagaggaaaggtttacgagagaaggaagtagaaagaagagagtgtaaggcggcgtcataatagaaatccgaaaggagtagaagaaaagagagagaagaaagaaaagaagagaaaagccgtacttaagaccgacacaggtactcgaggagaaaggagacccaaattaaggtgagagaatggacgataaggaactaggcaaaaggatatggtatctgcggtagaacatatgaaa

SEQ ID NO: 1129 - DNA, 400 bp, Cyanidium caldarium
  Clone ID: LIB190-021-Q1-E1-E5
gagccccaaggtatcttactcatttgcacacgatggaggcaagttttaccagaaacatgcaaagctcgagtcagatattccaacggagttatacaaaggctgtgggacagggtctgtttccaatggtttgttagatactttctttacagaacgcgttgcttccccatctgatccaactgttttaaagaagaaggagtcttgtctcttaagtaacgtatcaccacattttatatgtcgagactctgatcagaagagcgtgtattcatgctacgaacaaagtagtcctgaaatgagtactagcctagtagctacgagttccaacacgtcgaaagtttcaaataattcattcccctttcaagggacttcagtgttacctgcaacgagtaatctaagtacagct

SEQ ID NO: 1130 - DNA, 401 bp, Cyanidium caldarium
  Clone ID: LIB190-021-Q1-E1-E7
cccacgcgtccgaggtatcaaagtaaagaaagaaggaaaaggagaagaagagagggtaggcttagaagcagcaaaccagagaggaaagcgttaaagcatgaaagaaaagaaatccgataacgaagagaaaatggtaagaaagaggaccgaatcagggtaaaaggtaaaggagcatgaggagaagagaaaatgctgggtggattagcgaaacaggaaaggggaattaaagggtaagaaagaggaagggtttacgagagagggatttagaaagaagagagtgtagggcggtgtcataatagaaatccgaagggtttagaagaagagagagagaagagcgaagagaagacaaaccccttactgaacaccgacaggtgtactcgaggaaaaaggagacccaattt

SEQ ID NO: 1131 - DNA, 439 bp, Cyanidium caldarium
  Clone ID: LIB190-021-Q1-E1-E9
gttggtggaagaatgctcgcaaagggtgatgtgtagtcctttgagcagtttagctttttcacttttattgctgttggttagttacctgaaggaagggggagctctgttactagaaagtaaagagtgtggactcggaaagataatttcacatagtggggctgtctttggtcctaaccccggcgaatttccgctttcagagaaacctttgtttctccttacggcttcaggagagggcataaatgaatttcctatttattccagtcagcaaaacgaagctcttgtcgcccaaaggagtacggcagaaggaatggaacatggagtgtcagaggagcgtcgtagcttgcctgtagaaacagcgagatttggggagtggttaagagcagtgagaaagtggaatttgtttggagtaaatgaatttgaaacgcatactagtaaagac

SEQ ID NO: 1132 - DNA, 467 bp, Cyanidium caldarium
  Clone ID: LIB190-021-Q1-E1-F10
ccaagccttcggacggattacctcaggaggatcctaacagaacaaggcaatccgtttacaacaacggcagaacgagaaattgtccgtgacatcaaagaaaagctttgttatgtcgcatcggactttgatgctgagatggaacgatctaaaacgccaggcgtcatcgataagacatacgaacttcctgatggacaggtgattacggtgggttcggaaagattccgctgtcctgaagtcctatttcaaccctctttaattggcatggaatcagaaggcctacacacagttgcctatcagagcatcatgaagtgtgacatggatattcgaaaagacttgtatggcaatgttgtactttctggcggttcgaccatgtttcctggtattgctgacaggatgcagacggagctaagcagcgtttcaccatcgtcaatgaagataaagattgttgctccagcggaacgaaagta

SEQ ID NO: 1133 - DNA, 447 bp, Cyanidium caldarium
  Clone ID: LIB190-021-Q1-E1-F12
tcggccaaaccttagggttggaaggaaaaggcttaccccgggaaaggagactcccctgaagactgggccaagccggaaaaatgtcacgcctgggcaaaacttgtgggaattcaaaacgggtttttgcccctccgcaataaaaaattcctaagccgagggcattgaatttcaacttgaatgactatatattacaagtattattaaagcgagagtatgtatggagaaattcacagattgctcaagttacgacgctgaacaattgtaaacctgattatatcgttaacctgagtgtcttttccatggaaagaaaggtgacgcaacggatatcaaaaacttttttggtgatatgctttacttgatgttgagaagatactcgagaagaatattgaaatagcaaacttcattgccacaaaatgaatgcaactacgaacattgatattgaacagt

SEQ ID NO: 1134 - DNA, 186 bp, Cyanidium caldarium
  Clone ID: LIB190-021-Q1-E1-F2
ccttttcaaagcttgaagactatttattctgtactgttttagaggtttcttcagaggttttttgtactagtctttttctatgtttcgtagtgggtgaaaggctcctttcacaatagcgttgtcatgacccgccaatctccacatcttcaactgctaccttgtgcgcgtatatataagtatacagat

SEQ ID NO: 1135 - DNA, 424 bp, Cyanidium caldarium
  Clone ID: LIB190-021-Q1-E1-F4
ccggcccacccttcgacggaaccttgggggtactgagttggtgactgcctctctgtagcggaatggaaaacggcgtacaaggcaacgtttttgctcaaactgctgaagcagtaaacgagaattccattgctggagacaccaagggtacttttgcagtgaaagtatggttggctcaaatgctgaaaggtggagttatcatggacgttgtaactcctgaacaagccaaaattgcagaggaagcaggtgcttgtgcagttatggcgttggaaaagattcctgccgatattcgcaagtccaatggaatggcaagaatgtccgacccaaagataataaaagccataaagcaggcagtgtctatcccggtaatggccaagtgcacaattggacactttgtagaagctcaaatcttggaagcaattggagt

SEQ ID NO: 1136 - DNA, 411 bp, Cyanidium caldarium
  Clone ID: LIB190-021-Q1-E1-F6
gaaagaggaaagggatgaaatgcagagatctctagagaaaggcaagaaagaaaagaaaggaagacacagtaaatgaggcgagaaagcataggaagtgaaacggattaggaacccgtgtagtctatgcagtaaaagaaagaatgagtaagaaaaaagggagtcattccaccaggggagtaaaggcgcaagaaagaaacccaaagcaattgacgggaatcggaaaaaggggtggatcacgtaaattaatccgatataaaccgagaaccttacctctccaagaaggtgttgcacggctgtcgaaagaacgtgctgtgaagtgagagaacgtacgagaaagccaagtgaggaaaagaaggcaagtagagggcggcccgagaaaggagagaaagaggaaagggatgaaatgcagag

SEQ ID NO: 1137 - DNA, 401 bp, Cyanidium caldarium
  Clone ID: LIB190-021-Q1-E1-F9
tggatattcgcatacgagggatcgccaattccaaaaaaatgttgttgatggactcgctacaacataccgtggactggaaggaagagttgaatcaagaacaacaaacttgcaatttggatatgtttgccaagcatatacaagacacttcaattccacatgcggtgatatgtgactgcacagcatcggacgtcgtcaccgagaaatatgccagttggttggctcaaggaattcatctggtgactgcgaataagaaagccaattcgggttccttggagcgttatattcgtcttagagaggcacaacgagcagccaactcgcattttctttatgaagcaaatgtaggagctggtctgcctatcatatcctctctaagagacttgatacccacaggggataaactg

SEQ ID NO: 1138 - DNA, 318 bp, Cyanidium caldarium
  Clone ID: LIB190-021-Q1-E1-G1
gtttttgaagcaaaaggaatgtcgcgtatagtaactgaaaatgaaggtgactgcaaaatcttccaaaactctgtaacaaaaaagctatccaagattttgtggttgcccacagtttgcgggcatcgtgctcgtagaagaacgcagtttgccattgaactattaggagacacacaacaacatttcgggaaccatcgagtgtaaagagcagtagtttgagaatatcatattgaagaatttcttgcaggccttgctacattgtgtcttgtcccaagtcgacgtaaagtttgtgttgtattaaaagctatgaaatgtttcgac

SEQ ID NO: 1139 - DNA, 451 bp, Cyanidium caldarium
  Clone ID: LIB190-021-Q1-E1-G10
cggatccagtcgaccagcctcgccaagcctagcggaccttgggtttggggggccactctcggctcgtcaatgtccgtcaaccgcctttcagattatgcacaaacaaagaacaaagtagttatatgggtcccggtggtataatacatcgagaagaatgagaacatcccgatcaactagaaaacacaatagctcaagcgctcgtagatctttccagcgcctcctccgagccggaatacaaggacctcgtgtttgtagatgccaaagaatttcaagcaacatgagagaacaaagttgtggtcgtccatattccgttgagatggaaccatcaatatcgaaaagtacacggcaagttggtgcgacagttggaaaagaagcttgctgggaggacggttgtgttggtagcaagaaggaagatattgcccaaagcgaagaaaggagcacgaagagcctc

SEQ ID NO: 1140 - DNA, 470 bp, Cyanidium caldarium
  unsure at all n locations
  Clone ID: LIB190-021-Q1-E1-G11
gtcggaattccagggctcctctatccaaagtgataggaacgttgttcgaacatggatgggcacgcagtagatttgcgaaacctgaagcttatctcgaaaagtctactgagaagaatattggtgcgaatagagtagattcaactgtcaaatcttcttcttctgttgtcccagtgcgacaaggcgagtttgattggatggaattcttgaaaacatattctgattttgcagagtctgaagcaagtgaatgtttgtatgctttgaagagattctcagagagtgagatggaagtagtcgatacgagtatgttgatggagttacatgtcgctgattcccgcaagcgtgtcaaaatcgtagccgatatggcacgttatgctagagaganacgtcaatcttgaattcgttgttttgtcactttcttgtacgaagcatctgttactattcaacatatttaataaaatgtttggaatgtt

SEQ ID NO: 1141 - DNA, 407 bp, Cyanidium caldarium
  Clone ID: LIB190-021-Q1-E1-G2
aaattgttcttcgatggcactttgtttttgttttggttccttgtcctcttatcaaccactttctagtagtgggcgacattcttctgttttgaaatcctattcttggaacactcgatattcatgtaaatatattccaagacaagcagctgtatttcaaatgaaaacttttgaaaatgagactactccagtgaataatactagtaaggaacaacaacaacaagaccttgcttcttccaacggaaactctcctccttctactgcggcaagttcagaagaagaacaaacgaggttggtgactccttctccaaaaagatatggagcaactattgatatggatggaaagagcaatgtttgggcagtagaacctagagttacagtgcaatccgaagatgaaacgaaaaaagcca

SEQ ID NO: 1142 - DNA, 373 bp, Cyanidium caldarium
  Clone ID: LIB190-021-Q1-E1-G5
gggttgagagattcttatgagaatgactttttggaaaagaaaaagaggaatgccatttccatggattttagtatggatgaccaaatattggaatggataaaggtttaagtgtctccttcacctccaaaaaaaataaaaaaaaacaaaaaaaaacaaaaaaaaaaaaaaaaaataaaagaaagacaaataacaataacaaaaaaacaaaaaaaaaaaatacaaaaaagaaaacacaatcaaaaaaaaaaaggggggcccccccaaaaggttcaaatctaacatacccttgaaacaaatttcaaaccccttcaaaatggccaccaaaattaatttcacgggccttcttttaaaaactccttaacgggaaaaacct

SEQ ID NO: 1143 - DNA, 401 bp, Cyanidium caldarium
  Clone ID: LIB190-021-Q1-E1-G7
agcttgtttttcacttgtttgttgttgtttgatactcaacgacgtaatgagactcactcattttctctttgttttgtcttttgtagctgttttcctcgtagctcatgcagttcccgttggagaagatgcattcagtttcagtcagacttttggaaatgcttctgcttcaggcaacgcctctgttattccagctacaaccaagatccccaagttagaagtaactagtagtgcctcatcaaaggacaatggaaaagcagctcaagtagactttgcagattactcaaagggatatccttcgcctagctatttttacgctccttcttacacatcctatgtggaatttcctcaatatccatcctatccatcatggccttcttttaatgagcagcctgcctttggtg

SEQ ID NO: 1144 - DNA, 414 bp, Cyanidium caldarium
  Clone ID: LIB190-021-Q1-E1-G9
gtacagaaaatgaccgggaaagtgcagagtacttacttgtgtgagagacaatggaaaactggagggttcttagttgtcctttggtttcaatacatacttgaggttttataggaagaaaaaacatctattggaagctacttgttgtttttatttaggcttggtgaaaagtacaacaatttttttggagttgctcgttcgacaattctacggcatttggtttcttcttctccttctcctcctctgcgctatgccagccttgatcatcaccacgaatgcctggttcaaggacgaggtactcaatgaacttttcaaaagtatggcagaagccttacatagacccgaacactttaggctcctgtcggtgtcactaaggatgcaatgatgatattcgggactcaagtgagccttgtgccg

SEQ ID NO: 1145 - DNA, 402 bp, Cyanidium caldarium
  Clone ID: LIB190-021-Q1-E1-H10
ggaggagtccagacaattgtctttgttcaaacaaagagtcgattgttttttgcggacacttgaagacagttggaattggataaaagagacgaggggagcacatacagaagagaagctttccgaggagaattttgtctgcaatagtatgaagcaagtcgtgactgacacaatagacttgctagaaagagtagagcagagatgcatagaatgggacaaaaagacagaaaagctttcaggagaagtgaaacaagaatatttgtcgtttttggcgccttttgtgtatcagcgctttctcgtgtgtttgtttacttggaacgctctgttgattgaatgttttcattccaatttctttgtagtcgaaaccattcgagggtttgttacactgactgttggtgcccctgt

SEQ ID NO: 1146 - DNA, 416 bp, Cyanidium caldarium
  unsure at all n locations
  Clone ID: LIB190-021-Q1-E1-H11
gcaatattctgcagaaagaaagcgagaagaatgggaggttgtcaactgtccagaagcagagaaagaggaaatctatgatattctaaaggaatatggccttactagagctcatgtaaagagtatattggagcattttgagaagaacccaagtaaatgggtagactttatgatgaaatttgagctcggtttggagaaaccggatgtttcgagaccttggaaaagtgcgttatttgtgggcctttcttatattattggaggtattattccgctggtgccatactttttcattgaatcctccattgcggcgctaaaagtcagtgtggtattcacccttttggcgctttttatttttggttttgcaaagggtcatgtagtagctcataatagattggcctctgctatcganacgatggtga

SEQ ID NO: 1147 - DNA, 454 bp, Cyanidium caldarium
  unsure at all n locations
  Clone ID: LIB190-021-Q1-E1-H12
cgcgtccgggaaaaacaaatggtcatatatccacgtttcgaatttaccagtctcagctaacaatagtttggtttctaatagctgcacacgctcttggagtttctgaaccttgtgcattatttcttcaagtgttcggactttggaacgagttggcactactgctttctctccattggataccagttgaagaagcatattcagatgttcattgagttttttccgacttctttttgttgcaagattatgttttgctcgtctcgtatctgtgaaggaagcttgttgggacaacatcaacggaaatggaagaaagaatccgttggtaattcaactgatttttggatggacgacagcacatttgaaagcagttgctctgtagtatttgtctttgagctagaagaaaacagtgaggaaggcagtgatatgattgatcctgnngaaactcttcttgattgga

SEQ ID NO: 1148 - DNA, 440 bp, Cyanidium caldarium
  Clone ID: LIB190-021-Q1-E1-H2
ccgggccgagccacgcgtccacggaagcgtggggaaagattcctctcatgggaaaaaatgcgattctgtttgggttattttggcgcgcacacgcagtctttgttgctagataaagatgacgacctctaccgagcaacaacaagaaacaacaacaactccagacaacactttgcaaccgcaccataaccacttgaaaccttgccggaaccgcgcgcattcctaccgccatcccaatgcacatactccattgggcggtatcacgtgtcacgacgaaaatattatcaaagcacagaggtcggtaatatttcaactggtgaaacaagtagggaaaaacgtgttgatgggcagagacctactctacgtcacgtttcctattcagtgttgtgaagcggaatccgcgctccaaagatttgcgcattccgcttcgtatgcaaagtttt

SEQ ID NO: 1149 - DNA, 391 bp, Cyanidium caldarium
  unsure at all n locations
  Clone ID: LIB190-021-Q1-E1-H6
gcaaaagagagaaagagagagaaatggcaacgacgagtggaagaggaggaggaagtggcggtggtcttaccggacctccaaaaccaccacctcacgcagcaatacaagatggacctcctcctggtggttatccaccggtggatgttcgtagaaacttgcccaaagttgggccttccggtactactttgttgataggcatcggactgatcaccatctatgggttttggggagcgaccaaatcagctcaacgtagaagaagactgaaccaggaaaagtatcaaattcgattggctattacgccgtatttacaagccgaacaggaccgtttggaagtgaaagaggtaagtaaagtgtgtgggtgagganggcaanggacgcatatgagaaatac

SEQ ID NO: 1150 - DNA, 153 bp, Cyanidium caldarium
  Clone ID: LIB190-021-Q1-E1-H7
ggccaagcgacgcaacaagcgacgcgtccagaatttgcgacagtctggatcagaatcaatcagtacagcatcattgccaacttgtcgatacatcagaatacaactgtttccccccgttttgtgacaatatatctcgttggtgagccaacagac

SEQ ID NO: 1151 - DNA, 417 bp, Cyanidium caldarium
  Clone ID: LIB190-021-Q1-E1-H8
gcaaaagagagaaagagagaatcattaagcggaggaaaagaaaccaacggtgaggtccattttggagtactggttattacatggaatcttgcaaagaaaacgttccagtttctgaaaacttggtgctgcgagagcataaccgagaagattcaaagggtattgccaaaaaggattcagtagacaaacaggaggatacatatgcatatacaggaaggaaggtagaaagcaaggatcaacatcaaacagcttcggagacccaagtgccttctatgttttgttcaaattcctcgcagcgctacactctattcccaatacgttacccggaaatatggaaaatgtacaagaagcacgaggcttcattttggactgctgaagaaatcgacctgtcaggcgatttggaagattggaaaaagttga

SEQ ID NO: 1152 - DNA, 412 bp, Cyanidium caldarium
  Clone ID: LIB190-022-Q1-E1-A1
ctttcaactagtcttcttgtaatttgctgccatgggtctttccatctccaagttattatcgcgtttatttggaaaaaaagaaatgagaatccttatggtagggcttgatgccgcgggaaaaactaccatattatacaaactcaagctgggtgaaatcgtcacgacgatccctactattggattcaacgtggaaaccgtagaatacataaatatcagttttacggtgtgggacgtcggtggtcaagacaagatacgacctttgtggcgccactacttccaaaacacccaaggtatcatcttcgtagtggacagtaacgacagatagcgtttcccgaaacacgggaggagcttcacaagatgttgtcacacgaagaattgcgagatgctgtgttgttagtgttttgcaacaaac

SEQ ID NO: 1153 - DNA, 395 bp, Cyanidium caldarium
  Clone ID: LIB190-022-Q1-E1-A10
gggaagttatggcaaaaacacgtgccagcagcagcggtaaaacgtgtgtagcaagcgtagagcagaagaactgggtgtaaaggtcgagtagtagagtaagtgtaaaagggaaaggaaaggagagaaagaggaaagggatgaaatgcagagatctctagagaaaggcaagaaagaaaagaaaggaagacacagtaaatgaggcgagaaagcataggaagtgaaacggattaggaacccgtgtagtctatgcagtaaaagaaagaatgagtaagaaaaaagggagtcattccaccaggggagtaaaggcgcaagaaagaaacccaaagcaattgacgggaatcggaaaaaggggtggatcacgtaaattaatccgataaaccgagaaccttaactct

SEQ ID NO: 1154 - DNA, 426 bp, Cyanidium caldarium
  Clone ID: LIB190-022-Q1-E1-A12
cgtgttcgattggagagaaacatggaaatagtgaggcaagctctgaaagtcgatggctatcctcagattggcatagatacgttgttctgggacaaccgcccgtatttacccctcctccttgtgcttcgaaagatgaaattaggttacttcgacaaaaacatttagaatcgttgaagaaccttactccggaggaacgtctagagagaagaaagttgcgaaacaagcaaaatgcaatattatctaggaaaaaaagatacgagaggcttgagcttctcagaagacgaagagacgaagttaaacaacgactccagcaactttctacggaaatgtcagagttgcggaagtatgcccgtgaacttggtgagagacatgacaagtgtttctctctattacggtccatacgtcaactaactgcggggttttaat

SEQ ID NO: 1155 - DNA, 320 bp, Cyanidium caldarium
  Clone ID: LIB190-022-Q1-E1-A3
aggcctccgcgacaatttaacattgttttggcacagttttttggggggtttcaccatgtgttttctctcgacaaaactcgaccactatttacttcttgtgatgttttagaggtttttcgaaagtgtgtcttaggagctgttgtacatccagtcatggtggttgctgtatggttccagtgactacttgaagagggtttgtcactttcgcgcaattcaccacagcttcaacttgtagatccgcacatctacatcactatattaacatataattgtggtgtaatagaccgcaaattgagtggtcgagatcgattggttaaaag

SEQ ID NO: 1156 - DNA, 362 bp, Cyanidium caldarium
  Clone ID: LIB190-022-Q1-E1-A4
atcaagcgtccgctcactcatccgcaagtctgaggtacgacttgaccagtgatcattgtttcgactggtgacaaaagtgcaatacgcctcgtcatcttttatcggctttacgaaaaggagttgtcatgttgggacccgcaggatggtgaagtaatcccgattaagatccagccacacgatgctcaggtgaaagtcagtgcacggtgctgacgtgcaaatcgctcgattgacttgggtatatgggcgacatatgaatcgaatcatcgagtagcaggttcccgccgaagtttctcccaggatagctgcagtgtactttgagtaccagttttagcgggtcaaacgaatgattagagggctcgggg

SEQ ID NO: 1157 - DNA, 368 bp, Cyanidium caldarium
  Clone ID: LIB190-022-Q1-E1-A5
gaacttgtgtggatttctttgcatctccctcgagatgacgagaatggcatttgtaacctgcactggcttcactgtaaaaaaaccgaaacacaataatgcgaaacatacttcacacagaaccaagattatggcttccaacagtatttctgccttcgatgagcctgatatgcagaaagtgacctttcatccttcagaaagctaccagaacagaaattttgcacaccctttacagaaaacgtggtcaggagagttatctacaagtggtgcttgggagcgtcccatatcaacgagttttcttgaggaagtagtggttcctccggagtcatcagaagctttctcacgtttgcagagagatttagctatggaac

SEQ ID NO: 1158 - DNA, 427 bp, Cyanidium caldarium
  unsure at all n locations
  Clone ID: LIB190-022-Q1-E1-A6
ctccaccaatttggtgccctatttgactgttttaaaaacgctcaccacacgattgagagaagttggaattcagttaattgactacaatatcgttgagattttagtagagcttatgaaaggtgtcgaaatgactgtgaaaatacttgcgtgtaaaatctatgcgaatttaatgcattttaatctcttgcaagaagaccaagcttcgaaagttactgcggttctgattatgccgcttcttcatagaatgttatcaaagaacgaaagaaatgtccaattggaaggctgcaagatgttaagtgaggttgcttctattggagaaatctatcagagacaagcttttgactgcaatttggttcatgacttgatagaactgggacgttacataagtgtcgctgatgtanaagctgccagcattctgttacaagcc

SEQ ID NO: 1159 - DNA, 408 bp, Cyanidium caldarium
  unsure at all n locations
  Clone ID: LIB190-022-Q1-E1-A9
acgacaacaacagcactatacaagtatggtttactgcactcaacggaacttgcaagatagttatactcacagctgtgggattctacttggcgtacaggggcagactgaacaaggaaatgtccaaaaatattagtagcattatttttgagattttacttccttgtctcttattttcctctattttacgtactttggtgaatgtgggcttatatgccctgtggtatattccacttatggccctggtatatctttggatgggttgggtattgggtcagttggtatgtaaatggacaaaaccgccacctttttttagaagggcatgtatcgtancttgtgctcttggaaactccaatcagttgccagtattgattatggatactatgtgcgggttttacccttcttttcaaa

SEQ ID NO: 1160 - DNA, 425 bp, Cyanidium caldarium
  Clone ID: LIB190-022-Q1-E1-B1
ccaggcctacggttgcagaaatagttttcaagtatatgatgatgatgtttctagtcacaaacattttggtcaccgaatagcgatgccttttgttatgttggacaacatgaaaatgccaaaagatatggaatagaagaagaacaaggactctttattcaatatctttatcaacaacgtccttgtcgatggttgatgagaaatgtggaatatgcgacgtggtctcctcgctagtctttccttggctatatctatctacatcgatatcgtagtaattgtgtttcttgtgtgtgttgtggttttttttttcgccgataagaaataggaaaaaaggggattttcttatcgtgtgaaaaatgaaaatatggtcttattttcgtgtctcctttcctcctcctccttgggtggtcgcaaccatcgatgccaat

SEQ ID NO: 1161 - DNA, 330 bp, Cyanidium caldarium
  Clone ID: LIB190-022-Q1-E1-B11
attttgtattgggtggtcctggaagtggaaagggaacgcaatgtgccaagttggtgacggaatttcatttatgccatttatccgctggagacttgttacgcaaagaaatgcagtctggatctcccaatggacaaatgattgatcgaatgatcagaaatggtgaaatagtaccaggtcatattactattgagttgctgaagaatgccatggaagaacaaagcgaaactcgcggtttcttgatagatggatttcccaggaagttacattaagcaggagcttttgagaagttggttggtgattttgagtttaatttgtttttggattgtcctc

SEQ ID NO: 1162 - DNA, 375 bp, Cyanidium caldarium
  Clone ID: LIB190-022-Q1-E1-B2
gtggaaagtagaggaacttgagcacttttgtggatacgacgatgaacagaagccacctgagcccaagtttctaaaagtcaccgagtcgctttgttccccgctttcttttaaggaacagttggccgtggctattttattggaggaatatttgatggaacaactaaagaactttcaaaggatccagtaattcctttcagacgttttaaggcaccagagttgttgtatttaaaaaggggcctagagagtatgaggtataatgactacgttggaacaacaacaatttttgctgtttaagaaatcaaacgttgtttcaagtcaatagtttatgcggtaaagctgatggagtttgttccttgtggtccaggagcaaagagc

SEQ ID NO: 1163 - DNA, 342 bp, Cyanidium caldarium
  Clone ID: LIB190-022-Q1-E1-B3
cccacgcgtccgatggtttacatttacagaagcggaaagattgttgacaaaagcacattttcgacaagccgtttcacaagccaaagcaatgtttaacggttagataactttgcactggaagaaaaatactcggttctccatggaataggaacagtatccgtgcgatatctttgagtacatccagtttctgaaatatctttacaatctccataaagatattgtaataaaccaaacgggccaaaagagtatgaagtaaaaagactacgttggaacaaaaacaatttatgctgtttaagaaaatcaaatcttgtttcaagtcaataatttatgccgtaaaactga

SEQ ID NO: 1164 - DNA, 383 bp, Cyanidium caldarium
  unsure at all n locations
  Clone ID: LIB190-022-Q1-E1-B4
atcgacgatgacatttctcaccaaaaaagatgtggaacattgtttcgatgtgatatggtttagcatatttgatatccaatattcttgtttatgttcgttgaatgccttgaaccagatgtgtcgaacctacagcgtgtctgtgccggctggcgatgactttgaatttccaaactctccttgcttaagtgactgggatctcgttcattttgtttcccatagcaacgaacctgtatttcgtgtatttcacaagtgcatcatgtgctgctttttagaacaaagaatagttgtctttcgggatggcctttgtatactgaaaaattccaacagctggttgttgttggatgctttgcgtgatatcacanaacatgaaaaaggacaaagaa

SEQ ID NO: 1165 - DNA, 432 bp, Cyanidium caldarium
  Clone ID: LIB190-022-Q1-E1-B6
ggcatttgcttgaaactttacaaagaaacaacttatgagcgacagtgcttccattggagaaacaaagagtgtagccactttgttttcattgggttttaaaactgttcgaaggcctcgcgcgagagatagtgacgattgcacgctttcggaaggagagcaaccgaaaaagaggaaatgcgtcgagttgtcgagctattcaagtgatcttggtctcaatcataagaaactggataaagcgaacaacttccacaagctaaggcaatctatggatcgtttctcgttttccgacgaaaacccagaggaagcgatggaagttccggcgtctcctgatagaacgccggaaaggcaaattgtttccaacagagttgaaaaaacagttcctcctacccctagaaagaagtttcatagtgggttgcctacagtgttgaaaga

SEQ ID NO: 1166 - DNA, 427 bp, Cyanidium caldarium
  Clone ID: LIB190-022-Q1-E1-B7
aaaagatggacgccgctgtggagtttttacgaaactgtaaacaacatattgacaaagccttggaccgtccctatctaacttccgactatttaaaagactttgttcgttctattcattggacagaacccttcatattggggttaatatgtgctcacttgattctggcttttattacagtgaaaactagaaacaagaccaacttgcaaactccatctttttcacttcagttattactgtattcaatgtgaagaacttgaacaagttagtgtctgagaattggaaacaaatagctagcaaaaactatttcgacgagaacggtttctttatatttgtatttgtagctttacccttgttgttaattggaaactttattatgttgcacaatggttatttggctttacaaactatcaatgaaattagacgagag

SEQ ID NO: 1167 - DNA, 435 bp, Cyanidium caldarium
  unsure at all n locations
  Clone ID: LIB190-022-Q1-E1-B8
tgatgaaacgagacaagatcaagtcttggtatctttcccagtcttatccagtggcggtacaaaatagaatcaccgaatgtcttgctttattacaaaatcaacccaacaatattccttgctatatccaacaatatggaatacccgaagttgctggtttgcgtgctttgatatggaactgttgcattgaaaaattctttgcggtcgattctactacctctttgcacgttgcttgttcatcgtattgggaatcgatcgcacaatatcagcaacatccaaccgacgacccactactggatagtagtaccaccgagactgtcgtggaccatcctctcaacccacgtgccaacagtgcgtggcaacaatacttttccaaacaacgattganaaagaccattcatatggatacagttcgaacgcatcccgactggcatctct

SEQ ID NO: 1168 - DNA, 421 bp, Cyanidium caldarium
  Clone ID: LIB190-022-Q1-E1-B9
caacatgaggaatagcgctatggatttctttgtatttagcattattttggcaaatgttgttcttactattcaagcagcaacagttttggagactttggactcactgaactatacagagtatcttgacatggtaaaggctgcaggcctgaactcgaggtttaacgactctgctgcgacatggactgtgtttgcagcagacagtacaggagtcaatgccagcttgggagcaatgcacttggttatttcgaatatcgcatctgatgcgacggagatcagagaaattgctgaatcttatgtcaaccgtagaattaagtctgatgagatttagccaggaccaacgatccttacagctttgtacggaatgactttcactgttgttaaaaattcgacaggtttatttgtggatggcattacggtgatt

SEQ ID NO: 1169 - DNA, 198 bp, Cyanidium caldarium
  Clone ID: LIB190-022-Q1-E1-C1
gctttttggacaaggtcagacctcaatcaagtcagaaaggaacgttgttcaaacatggtgtgggcacgcggaatatctgcgacaactgaagagtatctcagtaagtctacagacaagaacattgttgcgaataggatgggttcatctgtcaaatcatcatcttccggtgtcacaatgcgaccaggttactttgaatgg

SEQ ID NO: 1170 - DNA, 275 bp, Cyanidium caldarium
  Clone ID: LIB190-022-Q1-E1-C10
tgttttttagttttcctggagatagttgtcattttatagccttaggtagtttcagagatagtagcggcaacgtttatttatgtctgtggtctccgcagggcttataggataattctcagaggtgaaaagaaattgcgcaactacttgcctttgcagaccaaaagtggcgcatactactcccttcagcgacgattcttgcgcagagttttcaagggcattcacaatgccaatcaatatacacaaaactgtgaaacgggatagagccgttactagta

SEQ ID NO: 1171 - DNA, 429 bp, Cyanidium caldarium
  Clone ID: LIB190-022-Q1-E1-C11
gttgggcaattcattctttattggtgctgccatgtcttatctcttacctcgtaagtattttccatggataaatatatggttattgaacgttatagttagaccttcactcaggttatgcagttgaccaagctattttaagtgaggaagatagagtcgtggtcatacgctttggtcaggactttgacccgacgtgtatgttgatggacgaaacactttacaaggcagcagaaaagataaaaaattttgctgtcgtctatttggtcgatatacgggaagtacctgactttaacgctatgtacgaattgtatgacccttgtaccgttatgtccttctttcggaataaacatattatggtagacttgggtaccggaaataacaacaagattaactgggctatgcaagacgttcaggaatttattgatattgtag

SEQ ID NO: 1172 - DNA, 406 bp, Cyanidium caldarium
  Clone ID: LIB190-022-Q1-E1-C12
cccacgcgtccggtcgaagaaggaatttacatttggggtatcataacatattatatgttttggggttctggtatgggaccttatgcttgggtactgggatcggaaatatatccaacttatattcgaagtgaaggaatggcgctagttacttggtggacatacattggaaactttattacgacttattgcttttccaagatgaaaagagcaatgactgctccaggaattttcattggtttttatggaggttttgttactattgcttggttctatgccatgtttatgatgcctgaaaccaaagataagactttggaagagattgatgctttgttttccatgtcgatgcctgatttagcgaaacataattgggataatgtgaagaagacagtggatgatctcttgcatt

SEQ ID NO: 1173 - DNA, 391 bp, Cyanidium caldarium
  Clone ID: LIB190-022-Q1-E1-C2
cccacgcgtccgcccacgcgtccgattctcgccgatgtcatcttttcataaaagaaatcttttagcttatgctcattatgcttccgatcacacaactggaaaaggaaagggagcaataacctttcaatttgagccacacaagcccgctttcgacttggaatttacgtatggtccgacaaaggctacaagaacttacgcttcttatagtgcagaacagtctcgtgtaaagcatattggtatagagcatagttttacgtgctttggaaagcgacagttattggatgggacttggttaccttcgcgagatagctgcaacctaaagtatagcttgaatgtagacaagagacatcaactcacaagttattttggttttcgaaagatatcaaaaaga

SEQ ID NO: 1174 - DNA, 315 bp, Cyanidium caldarium
  Clone ID: LIB190-022-Q1-E1-C3
gatgattttatgtccttgtggtagtactaatgtctatgcttggctaattgtcgccagtaacttgtcttcgtcgttcttcttattagtatgagtgaaaaggtggagaatggtactaataacgagttgttagaaaaaccgaaggttgtgatatttggtgctggaggcctacgtggttatttggctgccagacttgcacagtgtggacgtagctttgttcacgtcatcgccagaggttctcacttgaaagctattcaggaaaataacaattgcatcgttttaaaaagtatccatggtgactgcacttcccaattggat

SEQ ID NO: 1175 - DNA, 430 bp, Cyanidium caldarium
  Clone ID: LIB190-022-Q1-E1-C6
cggaacgcgtgggcggtagagctgcttggcaaaatttaggccagagcgccgtcgcccgcaccaatcccacttgtctattgaagcacactcaaggagcgaataaagagactactgaaaaaaaaatcatgcaaaaaaatcaacccgttcacgcaacatagctgttttgatgtagttgcagttgcccattgttatagaacgagcagagttggagtttgagatgaagtagtcgttgctcaagcgaaacatagttgactggcatcgagatgacgcactagtgatagtttcttccaatcgcaggtggaataggttttccttgtagaggctgacttgtggactgcgagattagtgtggataaagctcataggaagaaaattccacgtgcttcaagttttcgtcttgaactggtgaaaaataagggttacttggtgaa

SEQ ID NO: 1176 - DNA, 429 bp, Cyanidium caldarium
  Clone ID: LIB190-022-Q1-E1-C7
cccacgcgtccgcccacgcgtccgtatcgacggaacgctgaaagcttcgcagcaaatattcgaagagataaaaagaaggaagatgaaatgcagtttagcagtaataccaaaaacgatagataatgacataatgcgaattcagcgatcctttggtttcgagacttccattgaagcagcagcacagtccttacgtagtatacattgtgaggcttcatgttcttaccatgcggtggcagtgatacaagtacctggaagaaatagcggcttttttgcggtggagacagctttggcttctcgtttagtcgatgcttgtcttattccagaatttcctttcaagttgaactcgttgttgaatcatatttatgaacgggtacgagtgaaaggatttgccatgattctggtttccgatggagcaggtcatgaatatgt

SEQ ID NO: 1177 - DNA, 341 bp, Cyanidium caldarium
  Clone ID: LIB190-022-Q1-E1-C9
gagatgatgggagtaataagggaaggaggagtacactcgataatagggatgggaatgatgatgttattaggaagagaaaggagtaaggaagtaaaggagatgataaatgtgagtgtaagtgagagtggagtatggagtggagagaagaggaagaggagtgtaatgaaggaggagataaagggagagaaggagataagggagtggagtgagataaggatggaggaggagatggtaatgataatagcatgtatggtagtccattggagcaatttgaactggtatcgctgtataacatggagatacaaggaagggaaatacggacaagttacatacgagacgaa

SEQ ID NO: 1178 - DNA, 430 bp, Cyanidium caldarium
  Clone ID: LIB190-022-Q1-E1-D10
cccacgcgtccggtaatccgttgattggttgtgatggctcttgtcagaagacatttcactgtgaatgtgctcctggagatgaaagcgagcgaccaccgatagaatcaattgagctttatgcttctgacgagagacctctttggcagtgtcatagttgcactagtggtgaagatatttgtttctcatgtgggcgactaagacacattgctgatgcgaatgatgctctaaggaaatgtagtttaggaagttgtggacgtttctatcacatttcttgtgcacaacaggaaccacttgctagactagcatcagatggaacttggtttaggtgtccacaacattactgtgttgtttgtgaagaatcgggtgattctcgtcctatgatcaagtgcatttattgtccaagagcttggcatgtccaatgttcacatgg

SEQ ID NO: 1179 - DNA, 336 bp, Cyanidium caldarium
  Clone ID: LIB190-022-Q1-E1-D11
cccacgcgtccgcccacgcgtccgagctaccgcagtttcacctcgtccgcctccctgctaggcaaagagacaagaagagcattgagttacttgcaacaagagttgagagaagaaaaactatcaggatggagagtggcaaaagaaacacttcgacttttgcgtattgttatatcttcagtgtcttcaagtggtttagataaggttgaagaggctgtcagggagttgggacaggaactgacaagaggttacccacgttgttttgttgctgagaatatgacgagaagagtactgaaagtaatacacgaagagacaagttcagatacttcagatcctgga

SEQ ID NO: 1180 - DNA, 433 bp, Cyanidium caldarium
  Clone ID: LIB190-022-Q1-E1-D12
cacgcgtgcaatcccgttctctttctaggacagctcttctagcaacaaagtaaacatttgcaactctctgtgggaagtgcaacctgtatgcggtgacctgtgcatcgataagaataatgagggtgtgaaaaactactcttttcggagtcaatcagttgcatatgtcacgtgacatagtaaagttttgatgtgcacgcgaatgaagacaggttctagttgtctacattatgtgtaccacgctctgtaccaaagcataggcagtattagagccgagagttcttactatgcaggacaaatgatccatttgtttgttatctatgcaagtacaaatggggcgtttttatgcaggcgtaataagtaggcatcttcattcatttcaagttaaggcaactagcagttgggtgttgttccacttgcatatatcctccaaggg

SEQ ID NO: 1181 - DNA, 248 bp, Cyanidium caldarium
  Clone ID: LIB190-022-Q1-E1-D3
cagacacttggggaattttgcatatttggcaccacaattcaacaattcggtgtcgcgtgctgactacgtatctggcgtaaacgagggagtcaatttgcattttggtatgaaagttcttcagtgagaaacggactcagctggatgtgtccatgccgattattgctttacagattctaaagcgcatatccttagcaaaatgtcctaacgtgtgatatatgaaacataccgatgcatcggcaatattcatg

SEQ ID NO: 1182 - DNA, 418 bp, Cyanidium caldarium
  Clone ID: LIB190-022-Q1-E1-D5
cccagtaatgaggagtggagtaaacagaaaaggaagtaaaaggagggaatgaagggaagttatggcaaaaacacgtgccagcagcagcggtaaaacgtgtgtagcaagcgtagagcagaagaactgggtgtaaaggtcgagtagtagagtaagtgtaaaagggaaaggaaaggagagaaagaggaaagggatgaaatgcagagatctctagagaaaggcaagaaagaaaagaaaggaagacacagtaaatgaggcgagaaagcataggaagtgaaacggattaggaacccgtgtagtctatgcagtaaaagaaagaatgagtaagaaaaaagggagtcattccaccaggggagtaaaggcgcaagaaagaaacccaaagcaattgacgggaatcggaaaaaggggtggatcacgtaaa

SEQ ID NO: 1183 - DNA, 325 bp, Cyanidium caldarium
  unsure at all n locations
  Clone ID: LIB190-022-Q1-E1-D6
cggacgcgtgggcgatgaggaagaagaaatcgagcgcgtgggattgtcgtgtcctttcgtttgtttgtggaagcgatgacttcgattcttcacgacttgggaataacaagaccgaaaacacccaaaataccgcctgctcttcaactcagtgatggaactccttttccagtggcttgctccaaattatatcctgatcgagacgtggatatatacgcgcttacgatactaccgtttgacaacgaaagaaaggctgtggtgagtgctggggactctgccgctcacgtggttgacttgtcaacaacacttgtaactgtnagtctcccgg

SEQ ID NO: 1184 - DNA, 403 bp, Cyanidium caldarium
  Clone ID: LIB190-022-Q1-E1-D7
cccacgcgtccgcccacgcgtccgcccacgcgtccgcccacgcgtccggactcgctttcttgttttgtggtggttgtcgctttttgtctctcaagtttttgccgaaaatggttcaacagtggagagcagcaggtcgcacttatcttcgttatgcaaatacatgtgcaaattttgttcgcaaggcactaaaggaaccgaaacgaactgaagcattgtcgaggaccggttttgagatgacgagaagcgagtggagtgaaggcaaggttgtgaacagaggtaagtccacgaacaaaactactagaacggtgatttgatggagacaccggcagagacccttatacaagataatgaaactagtaacgtcgccaagaattacaagtgaatgtgtttgttgttataaacg

SEQ ID NO: 1185 - DNA, 425 bp, Cyanidium caldarium
  Clone ID: LIB190-022-Q1-E1-D8
ggaacctttgcttctaagattaaagttgacggtgaaaagttacaagtaactcgagaagtggacagaggtttagaaactctggttcgttcttagttaacccttttatagtattattatcgttattgttgtttttaggaactaagacttcctgctgttgttacttgtgatttgagactgaatgagcctcgttacgctaccttacccaacataatgaaagccaagaagaagcctgtggagaagttaggtttgaaggatttgaacttggagccttcacatggaatagaaactctatccgttttcgaacctccgaaacgacaaggtggcaacaaagttgaaagcgtagccgagttgatcgacaaactgagaaatgaagccaaagtcatctgattttgaaaacataaagtaattacgtttatttcgtttcc

SEQ ID NO: 1186 - DNA, 430 bp, Cyanidium caldarium
  Clone ID: LIB190-022-Q1-E1-D9
cggacgcgtgggaaattttacaacttgcgtttcatagttttggaactaacttgacatgcaacaaagtaaccttcgagtagtccaatcttctttggtggcaagctttgtcctcattctaagtataatctgtgccattcatgcagtaacagccgatgaaataacaagtttcgagagaggataccaaacagttgcaccaactcagacgcagcaatgtcaaaagatttgtgtcaccgccacacaaactcaagttcaaagttgtatttatactcagacacaggctccgttcatgtctcaatgtgtcacagcattgccaactacctgctataaatacgtaacaaaatataagcaggtgtgctgtgagcaagaatacgagcaacagaattatcaacagcagcaggtttgtcaacagtattgccaactatcgtaccag

SEQ ID NO: 1187 - DNA, 278 bp, Cyanidium caldarium
  Clone ID: LIB190-022-Q1-E1-E1
cgcatgcgtcggaatgtcgatttggttgagtttcgtgtggtttgcgtacacaattccattgaggacaagtcggtgcttacgttctaggccttttgacgcatcaagtcgttgttcgtagtcaactttgaaaggactcgctcttttcttcatcgagacatggaatgtgttgctagaagtagaatagagcctgtcgcgagggaacatacggaagttggtctagactctccaatggatcgaaacgacgattgtaattttggtatgataaccaggattgaaat

SEQ ID NO: 1188 - DNA, 319 bp, Cyanidium caldarium
  Clone ID: LIB190-022-Q1-E1-E10
gcaaataggaatacatggatttacaaggacaagccacttgtgaaaaatataccaaaaaaggcatcttgtggacaacgttggtcgccttggtcgttggactagtcacagacgattacctgcgaatggttcaagtatttatattgggagtagttttggtagctatggtaagctgtctctatgtgtttattggacacttctatttccaatcctatatacttgtagggcgtacttttcccctggccatggtatacaagacatccacttgtgtttgtccacgccgcaaccaaacacaacaataataacaaccattcttaaccaa

SEQ ID NO: 1189 - DNA, 432 bp, Cyanidium caldarium
  Clone ID: LIB190-022-Q1-E1-E12
caacaataacacgaataataatacaagtattataactaccaataatagcaatgtgagcaatcgatgtattgcctatttgattgaaacgagcaacgacaaacatccacccgagtccactttgggtatcttggaagattggaccaacagtattagtgttgctccacacaatggacatattcctcgaaatatacgattgtctttgatggcaatggatttattacaaccttttatttatcttttgagttggggaggagaagaagaaaataattggtggaagaattggacaaggatgaatatggaatccacgagtgatgattaccacaagaatgtattgtgggaaagatggcaatggctgatgagcatggacaatactccacttgtcatcaactattcgagtgtgcaagaagataatacttggatgacttggtgggt

SEQ ID NO: 1190 - DNA, 443 bp, Cyanidium caldarium
  Clone ID: LIB190-022-Q1-E1-E4
ccaggtcgaccacgcgtccgccacgcgtccgggtattttcactaccgtgtaacaattggcatatgcatttggatatttcattggccttattgtggacgtcatatttgttcatgtagagcatggttggcgttttatgcttggttcagtcattgtgccagcttccctagtaacttgcggattatttttcgctgaagaatcgccgaggtggttattagcaaaaggacgcgaaaatgctgcgtggaatgccttgacaaaactgcgttcttctgaagaattagccacgcaagactttgatgtaatgcgccagttcttagagaaagagcggcagacaatgaaagagcaacctggtctctttcgtacgctatatgaaaagccaagtgttcgtcgccctgtcatgctgggcactgcattacaaatagctcaacagtttttgtgtgtcaatg

SEQ ID NO: 1191 - DNA, 419 bp, Cyanidium caldarium
  unsure at all n locations
  Clone ID: LIB190-022-Q1-E1-E7
cggacgcgtgggcggacgcgtgggtggttgctcaaaaagcaggttgtaagattcctgaagtagatcgtgtcgtcgtttggggcaatcatagcgctacacaatatccagatattactcatgccagaatcaaaggagaatcggccagaaaagttatcaatgatgaaaagtggattcgagaagttatgatacctaaagtacagcagagaggagctgaagtaatcaaagccagaggtgcttcttctgccgcttctgcagctgctgcaatagtcgatcatatgagagactattggcatggagctggtgaccgatggtgctctgtaggaattcctagcgatggaacttatggaattgatgaaggactttggtattcagtgcctgttatgtgtcctgntggacattatagacggatcttgaatctt

SEQ ID NO: 1192 - DNA, 370 bp, Cyanidium caldarium
  Clone ID: LIB190-022-Q1-E1-E8
cccacgcgtccgcggacgcgtcgggttggtcaacgcctacgacgtcatcgatcagtgcggcctaaccggtcgtgctaaatcataccctctcgtagaaacctacaggtaaacatacggcgagatctaggtatactataacgcaaagaaggaattgaacccgatgatcaaggcgatacaaatgcacatgcgctcgacaatctgtccatcgcaactactcagactttactaaaagacatcacgcatgagccttgcaacgaattacaagcactagcagataacaaagtagaggaccaccatcatacttataaaaggttcgagaaatatcgtgaagtacacagccgatatctaccatcgttaaaagcaaaacctg

SEQ ID NO: 1193 - DNA, 348 bp, Cyanidium caldarium
  Clone ID: LIB190-022-Q1-E1-E9
gcaaatgagaagggatttgagttgaaagaagagttgccagcttcggtgaaacggttgatgaatagagagtctttttccaaaaatgtcaacgaagaaaagaacaatgcaatgaataaggttgtcaaaaaaacagcaaatctatccttggaataaattttgattccgtaatgagaattcatacagaagaggaatggaatggctggaatttttcaaagcaaaaaaaaaaaaaaaaaaaaaaaaaaaaaaaaaaaaaaaaaaaaaaaaaaaaaaaaacaaaaaaaaaaaaaaacaaaaaaaaaaaaaaaaaccaccaaaacacccaacaaaaaaaaaaaaaagggggggccc

SEQ ID NO: 1194 - DNA, 436 bp, Cyanidium caldarium
  Clone ID: LIB190-022-Q1-E1-F10
agatggagaaggacgagcatcaggcagtggcaagggaattggctattcgcaaacgactcggcaaagtatttaaaaaaaaaagagagaagactttgctactgaagaagaatataataattatttagaagcttttgaagatgctgtatatagtttgagtgaaggaaccaacacagatgaagcccaagcaagtatggagagacttgcaaagtatatcaaagacactagtagagaagaaatactcatgaatccagttttgattgtggatgatgagagcgaggacaagaataatgagagtagcgaacaacaaggagtgacctttgtagatcctgcaagaccagcaaagcctatgcctgctcctttacgagacaacagtcctgtggatgagaagatgcgtgcaagagcttccggattcgacgaaaaactatgtcgtcaacga

SEQ ID NO: 1195 - DNA, 412 bp, Cyanidium caldarium
  Clone ID: LIB190-022-Q1-E1-F11
agcgattggaagaggctacagtatctgttttatccgcgctggattccatcaggcgttttggtctccactattcttcctatactgccaatgcctacattattcttatcaatatctttttacaggaaaaggatattttaagtgctcaacaaactgcttcagagttattagaaatagtggagaagattggatttcatgacttacctttattttcagatacgatgggaacgtatggtcctatttcctatgcttccggtgattatgtggaagcagaaaggaagttacgtttggcactggattctttacagtcttggagttgttcctatttatggtttgatgttcctatgaagcactgtatgcatttagatttgtggttgatggattggctttcccgactattgaatgctcatggtaa

SEQ ID NO: 1196 - DNA, 382 bp, Cyanidium caldarium
  Clone ID: LIB190-022-Q1-E1-F12
cccacgcgtccgcggacgcgtgggggaagatatgagtaaagaaagagttcaaagtgctacaccttttgattggaaaacttttcttcaccagcgtgctttattgccggaagaagtttcagctcgttatgctccaagtttttcacgtatatttggagataacccaagagtaattctaaggaggtcgctagagttgatgcgtatccctgaagagcatattcagcttattctcattgcggtagagtcgttggattcgggcattgaatcatagtaatagttactgatcatttagagcattgttttgcgcatgagtttctatttgatgtataaagattttagggtaacagggagtgtagttttttagccagaagagccctgcatacat

SEQ ID NO: 1197 - DNA, 423 bp, Cyanidium caldarium
  Clone ID: LIB190-022-Q1-E1-F2
cagcgattccatgttgaaagagggtacacgtatattgtccgatctcaagtttcaggtgcttcaagatggaaaaccccaggtgataacttcggatcaagtattcggaggaaagaaagtagtattgtttgggttacctggtgcctttactccaacctgctctaggcagcaccttccaggctttggacagaaggttgatgaaatcaaatcgaaaggagtagatacagtcgcttgtttagctgtcaatgacccttttgtattacatcagtgggcagagtcacagggagtggcaggaaaaattctcatgttagcagatggtggtgcgcaatctgtcaagaaacttggactggatatcgatactggtgactttggtggtattcgttgtcgtcgattctcaagcttgattgacaattatgtcgtgaaaaa

SEQ ID NO: 1198 - DNA, 361 bp, Cyanidium caldarium
  unsure at all n locations
  Clone ID: LIB190-022-Q1-E1-F5
aaggtatcaaagtaaagaaagaaggaaaaggagaagaagagagggtaggcttagaagcagcaaaccagagaggaaagcgttaaagcatgaaagaaaagaaatccgaaaaagaagagaaaaaggtaagaaagaggaccgaatcagggtaagaggtagaggagcaagaagagaagagagaatgctgggtggagtagcgaaacaagagaagggaagtaaaaggtaagaaagaggaaaggtttacgagagaaggaagtagaaagaagagagtgtaaggcggcgtcataatagaaatccgaaaggagtagaagannagagagagaagaaggaaaagaagagaaaagccgtactgaagaacgacaca

SEQ ID NO: 1199 - DNA, 355 bp, Cyanidium caldarium
  Clone ID: LIB190-022-Q1-E1-F7
cccacgcgtccgcgcaccccaaaagatatttataaagacaagtattgggtgtggacaaaaaaccaaccgtgggaacctatcttgtacggacaatgtcgtctacttattacgaaaaagaaaaggaaaatattcatcccaatatctatcccacaggagataggataataagtggtgatgacaggcaggttgccaggaatagatccccaaggcagcctttacaacccatttcttacaatactatgcagaacaatgtccatcgaatactgattcgaagtgtacggtaaagagaggagtgcgccaatttggttggttttggagggataccatattatatatatacgcatatatgtataca

SEQ ID NO: 1200 - DNA, 438 bp, Cyanidium caldarium
  Clone ID: LIB190-022-Q1-E1-F8
cggacgcgtgggcggacgcgtgggtgacgaaagtaattatttagaagctagctttactccagattcaaagcaagttttgagtggttccgaagatggctcgatttttatttggagcacaacaaccgggaagcatattgtaactttaactggtcatgaaggcccagtttgtgcggtcaagtggaatcctcaatatgccatgatggcaagtgcctgccagaatgtcgtgttttggttaccaagtgcgttgtccacatagggaaataatttgtcttggtagttaaagccgggctgttttctttggctttgaacatgattttgttgcagcatgatgttaagagttaattataggcactttgatgagtcatttattctgctgttagcagcaacatgattttcgcttgtaatgacgttttcttcgagtagaacctgaacactagg

SEQ ID NO: 1201 - DNA, 398 bp, Cyanidium caldarium
  Clone ID: LIB190-022-Q1-E1-F9
cccacgcgtccgcattaactggacatacttatcgagtattgtatttagctgtctcacccgacaatgaatcgattgtgactggcgcaggtgatgaaactttgcgattttggaaggtatttcctgctagtcgtcaagtcaatggtttggaatcgaaaagtttgctttcaactggtcaaaattgtttgagataaaataccacaaaccacacacaaaaaaaaaaaaaatccataaaatacaaaacaaaaaatatacaaacaaaaaacagattcaaaagaaaaaaaaaaaaaaaacaaaaaaccaaataaaaaaaaaaaagggggggccccccaaaagtttcaagcttaagttacccttcaatcaaatttaaaacccctccaaaggttccccaaaattcaatt

SEQ ID NO: 1202 - DNA, 322 bp, Cyanidium caldarium
  Clone ID: LIB190-022-Q1-E1-G1
cccacgcgtccgcccacgcgtccgcccacgcgtccggaaaactttggcagagaatagtggcttcgatgcacaagaagttctattgaaattgcagtcagagcatcaaaagggacatattgttggtgttgacgtggaaaccggtaatcccatcgatcctcttatgttgggaatatacgacagttttgctgttaagaagcagctgctgaacctttcatccatgatagcatcacagcttttgttagtagacgaaatacttcgagctgggagaaatgttccgttcaaatcaggcagtaatcaataaaagcatccattcctcctcctt

SEQ ID NO: 1203 - DNA, 431 bp, Cyanidium caldarium
  Clone ID: LIB190-022-Q1-E1-G10
tgcccttctccaaccagctgtcctggtatccgtcacaaggcagaaacccaactgacaaaaagatattcaaggagtgtatgttctcgtgaaagaggtgcgttatttttaactggtcgttataagaaagactttcgtccccgcaccgtacgacgtccttttcgaatcagttccctcttaaagagagaattggcggatatattgcaaaagcatgcgcttcaggacaatagatttcttagtgaacaaacttttggtttgatttctgtggttcgggtagatgttagccccgaccttaaaaatgcgaaagcttttatcagtgttacaggaacggatgcccagcgaacagcaacgtatcagtggttacaagatgaacgcaagtccatcaaatatgagttgtctcagagagttcgagagataagatatatacctgaact

SEQ ID NO: 1204 - DNA, 424 bp, Cyanidium caldarium
  Clone ID: LIB190-022-Q1-E1-G3
gccaatttgtacaattcttataaacgtggattccgtaccaatggagtatcttttgtatgtattttgtcgattgcattatgtcgtctcttgattatgcctttgttgggttggtcatggatacagttattattgcactttggaatattatcggatcgaacggacaatattcaattgttggtaatgatgatagaaacggcagtaccatcggcaaacaatgtggtgattatgtgtgagatggttggaacgagtgaagagcccatttcgttggcgttgttgtggcaatttatattggctcccttgtttttgacggcaaatatggcgtttttcttgtggtctttgaaatagtttacaattcacacgttggatatattggtcatctatgtaagtttgtgtggaaaagaataattctttgggttatctttgt

SEQ ID NO: 1205 - DNA, 427 bp, Cyanidium caldarium
  Clone ID: LIB190-022-Q1-E1-G4
cggctctgtaacgaccacttttcatttcccaaaacatgtcgctaggaaacaatagcctttttcaatctctaaacgcggctgtagaaaagtcgaaaaagtcaaaaacccttccgaactatggggacggtgtggagttggaaggtacgtttcgaatgcctcccgtatcccccagcaactccgcctctcctttgagcgaaatgggtggaagagtagaaccaatgaggttttctggactaggttcagcgttttctcggtcttcggatgacggagatgtggcttcacgacaaggtacaaccgtggactacttggaggcaagcttatcgcagtttgaagatgcaacgaatgcagcgggttcaaagagaaagtcggctcgtaacggtgtttggtatgaagaaaaccacaaaaagggcatcttttcgaagaaaga

SEQ ID NO: 1206 - DNA, 411 bp, Cyanidium caldarium
  Clone ID: LIB190-022-Q1-E1-G5
cgaaggatgaagagagcagatcgcaaggctctcgtacaactctttcaaagttacaaggaacctgatggaaattatattggtgcacaaggtctacaaaaactcttcgaagaccttcaagtagaccctagcgatatcgtcactttggtacttgcgtggaaattgcaagcaaagagtgcgtgcgagtttacagaaacagagtttgtagatggtttggcaaatatgcaagtagactcgttggaaaaattgaagaagaaactgagttctttgagaaaggaattggatgatccttccaagtttagagctttctatcaattcgtatttgattattccagggaaccttctcaacgttcgttaccttccgacacggcaatggctttatgggaagttttgttgcgaggaagattccctttg

SEQ ID NO: 1207 - DNA, 411 bp, Cyanidium caldarium
  Clone ID: LIB190-022-Q1-E1-G7
cccacgcgtccgcccacgcgtccgaaaagcgggaaaggaaaggagagaaagaggaaagggatgaaatgcagagatctctagagaaaggcaagaaagaaaagaaaggaagacacagtaaatgatgcaagcaaacatatgacgcaatacattagatcatagcatatgccattcagttaagtaaaccgatgagttgagtagtgtggtgtaatggaatagcataacagcacagcacagtgtaatgtatggttagggtagagtccataccagaagtgaaatcgggactctaatctgagaagaggcacattggatttgaaatgaggtccagtcaagacaagtcagctctgcagaaaattgggcagtgtacagggaagtgagatccaatccagtagagtggagtagacataacaggaa

SEQ ID NO: 1208 - DNA, 420 bp, Cyanidium caldarium
  Clone ID: LIB190-022-Q1-E1-G8
acgccgttcagtgatattatcggtgaccaagaagaaaaagaagtgaaggaagcagcagaagtttccatgggaacggaattgagcgacgaagatgtatccaacatccgtgagttgtgcgaacaagtgattacattggcggaatatcgcgccactttgtatgaatacttgaaaaatcggatggctgcagtagctcccaatctgactgctatggttggagaactggttggtgcgagattgattgcgcatgccggaagcctcatgaacttggcaaagtatcctgccagtacggtgcagatattgggagcggagaaagcacttttccgagctttgaagacaaaaagcgctactcctaaatatggtcttatttttcatgcttctttggttggtcaagcagcacccaaatacaaaggaaagatatca

SEQ ID NO: 1209 - DNA, 382 bp, Cyanidium caldarium
  Clone ID: LIB190-022-Q1-E1-H5
agaaaagcgtggtgcagatttacattcatcgccgcacacaacagtgaaagataaaagaaattcttcacaatcggatgcttggtagtacctggatagagatgttctcgtaagaatcgtggaatctttcaaagaaactcgaaacgagatcgacggcatttcagggtatacgaaagaaggtagatagaaaagatgacggatctagcatccaatagtatttgttgtcgacgaaatgcttggcagtggacatggtctacttgtagcaagtctcacgctagagcttcaaatattgagagaaaatgtgtgaatgcatctcttttttaatcgaagtggtgtacaaccgatcttgacatttgatcgctactagctcaattgaaacctatct

SEQ ID NO: 1210 - DNA, 272 bp, Cyanidium caldarium
  Clone ID: LIB190-023-Q1-E1-A10
gggattgtttgtggcgaactccttacagtggtgtatctcgctttcctagttttgtccgtaacaggaaacaatcaagaaaccgctgttttcaacgcgagaaatagttttagtctcccaccaacgattggccactttgggttacgtgccaagtcgacgaaaaagagttgggcctaactccaaaactgggaagactagtaaataattttgcagcagctccagaacccaaacttacgaatcaacaattgctttacttggcaaaaacgttagaaccc

SEQ ID NO: 1211 - DNA, 447 bp, Cyanidium caldarium
  Clone ID: LIB190-023-Q1-E1-A11
taccggtcaaggggttcaggacccgtcagaacttgaatgattgctgtcttcagctggcgccctaaatactccgttatttccgtcatattgttgttgggaagaaagactttgagaattgcttcagacgcatccaattgtatgtttccataaacaatgtcagaaaacaaacttatctacaagaaaaataagaaaacacactttgcgaagggactaaagtaccattaactccaacaaagctggtctccagctttgagaaagactttgagggtcttgtagaccacaaagtgccatcgttaatgatttccagacttggtagaatagctcattattttgatcaaagcattctgactcgtgtattgcatttggttgtttgtatattgcgattatattgtgaagtaagtaaagaaggaacgaaatcctgtgattggaagaaacaggaagttcttg

SEQ ID NO: 1212 - DNA, 406 bp, Cyanidium caldarium
  Clone ID: LIB190-023-Q1-E1-A3
cgcgtgcaggtggcgggcaaggatccaggggtcgagggacgcgtcacgcccacgcgtcagcccacgcgtccgcccacgcgtccgcggacgcgtgggaattttgaaaggatttcctgtcgagttggagttgaatttagatgaaagagatacggaaagtgattctatagagagaatagagcatttgttgagttgttcgaagaaaattgggttgaaagttgcttccatcaacatttgtcaactggaatcggaacttgttgtggagaattttgtcagactttgggatgttttgaaaagtattgcagaggcgtctgtggtagtatctgtcaatatgcgtcagttacaggaatcctgaaatgaggccaatttggtcgagatggattcttcctcaacagaaaaacttgttgca

SEQ ID NO: 1213 - DNA, 389 bp, Cyanidium caldarium
  unsure at all n locations
  Clone ID: LIB190-023-Q1-E1-A4
gggccgatcgagtgttccattttctccatcatgttgcttgaaaaaccgttcgttccaaagctgcgcgtttgataagaactgtgttttctcatgtctcgctttcctccagagttgttcttctcaccacacaagacctttggtccacttggttataagatattctcgtctcctcacaagtatgcacaaggcaaaggaatcatacagtatctgggactattcttgaaacctctacagggagacattgcggtagtggtatgttccccttcgaaaagagaacactatacgtagtttgatagaacattctcgtattaaagatggatctgcanagcaagttgtatttctggactttggtggagaatgttcgtgggaagaacttgcaaatgtgaata

SEQ ID NO: 1214 - DNA, 402 bp, Cyanidium caldarium
  Clone ID: LIB190-023-Q1-E1-A6
gtgggccttcgacagggaagaggactaagtggggaagcgttgaagcgtttgaaagttttgcagtcggaaagcttgtaaaacaagttatcggtgactaatcttcaagggtactttggaacgaacaagaaccctcttaagagcaactccacactttagctgcaagctactgttaggctccttgttgtttccaaacagaaaggaaagggtaaaagaggttgctatttggaagagtatttgaaacgtcacagtatttactgagtttgcaacgagtattatggacatgacaaaggagccctcccaagtgataagataagtttgggcggaaaacctggaggaggaactagcaaatatttcctccaaattggataagtataactttgttgcaatggataccgagtttcc

SEQ ID NO: 1215 - DNA, 273 bp, Cyanidium caldarium
  Clone ID: LIB190-023-Q1-E1-A7
cccacgcgtccggaagaatatgacgagttggttaatgcagatatgtggaatgatgccgtaagaattgccagtatccaacaaagacaagtacgaaccagcgttttgcattccaaaagtaatggcgttttatccttttcaggaaaaacatccaccacaacttttcgatatcccatggacgttgttatttttgagaatagtatttttggtattgcagcaggtccaaatgagatttggagtttgaatcctgcaggagaagtcaagttgatatgtcat

SEQ ID NO: 1216 - DNA, 405 bp, Cyanidium caldarium
  unsure at all n locations
  Clone ID: LIB190-023-Q1-E1-A8
cccacgcgtccgcccacgcgtccgggaggaatgttaggaggaggagaaggatatgagaatagaggaagaggagagatgatgggagtaataagggaaggaggagtacactcgataatagggatgggaatgatgatgttattaggaagagaaaggagtaaggaagtaaaggagatgataaatgtgagtgtaagtgagagtggagtatggagtggagagaagatgaagaggagtgtaatgaaggaggagattaaggagagatgaaataggtgtatgatgcaggcaaagaagtgacgcattatattcagagagtacacatgcaagtaggtanagcgaacgggtgagtaaagaggtgtgaaacagtggaagaacatgaaagcacagaagaatgtaagaaatggttagagt

SEQ ID NO: 1217 - DNA, 436 bp, Cyanidium caldarium
  Clone ID: LIB190-023-Q1-E1-A9
atccccggtccaaccaagcctccgggaaaaaaccggcccatgggaatggttggtgggaaacccctaaaattggggaaccccccttcccaagtttggcccgtaccaggaaccaaccagaaaaccccggtttccaccgcaagaaaaggtttaatccccccaccaacaactggcaactttgggttaggtgccaattcaacgaacaaaatttgggcctaactccaaaactgggaaaactagtaaatagttttgcagcagctccagaccctaaacttaggattcaacagttgctttacttggcacagactttagagcccctgcctttccagtacaagacaaacgagaataaggttcccggttgtctctctactgttcacgttattggcgtctgtgaagacgataaaatttttttcaagggagattctgacgcacagttaac

SEQ ID NO: 1218 - DNA, 357 bp, Cyanidium caldarium
  Clone ID: LIB190-023-Q1-E1-B1
cggacgcgtgggaactattgagaagtacaaagtttccctatttgctggagttccaactatgtacattgccatgttacgttgtccagagtcagataaatacagtttgaagagcttgaaactagcgataagtggaggagctgccattcctgttgaaatattaaaagaatttgagcagaggcatggaattgctatcatggaaggttatggattgtcagaaacttctccaacttgttgttccaactctgccaagggaggaaggaagccaggatccattggacgtcctgtttggggtgtagaaatggcgatattggatgaaaatgataagccagttcctgacggtcagccaggtgaagtatg

SEQ ID NO: 1219 - DNA, 200 bp, Cyanidium caldarium
  Clone ID: LIB190-023-Q1-E1-B10
cccacgcgtccgcccacgcgtccgcggacgcgtgggtggagataggattccgattagtatttcctatctcttcattcgcatggcaagaacaatccgttgctcatcttataattccaagttggcagtccactcgtccaactttggattcgctgggagcaaatagaaaatttcataatacactttattgttgttgtattctc

SEQ ID NO: 1220 - DNA, 299 bp, Cyanidium caldarium
  Clone ID: LIB190-023-Q1-E1-B11
tgcatgctgacgtcatcgttttagcagtaaagcctgatgtagtctctgaagctcttaagtccataaaggacggatggaaaccggaaaaacaccttctagtttccatttgcgcaggagtgtcgattgggacaatagaacagcagctggtaagcaaatctagagtcattcgagttatgccaaacactccgtgtctggttggagaagcagcagtcgctttctcttgtggttcttgtgcaacaacggacgatcaaaaagtagtggaaaagattttctcttctgttggactggcaagttgtgtt

SEQ ID NO: 1221 - DNA, 405 bp, Cyanidium caldarium
  Clone ID: LIB190-023-Q1-E1-B2
agaaagaggaaagggatgaaatgcagatatctctagagaaaggcaagaaagaaaagaaaggaagacacagtaaatgaggcgagaaagcataggaagtgaaacggattaggaacccgtgtagtctatgcagtaaaagaaagaatgagtaagaaaaaagggagtcattccaccaggggagtaaaggcgcaagaaagaaacccaaagcaattgacgggaatcggaaaaaggggtggatcacgtaaattaatccgatataaaccgagaaccttacctctccaagaaggtgttgcacggctgtcgaaagaacgtgctgtgaagtgagagaacgtacgagaaagccaagtgaggaaaagaaggcaagtagagggcggcccgagaaaggagaaggcgtaagacgtgatacag

SEQ ID NO: 1222 - DNA, 409 bp, Cyanidium caldarium
  Clone ID: LIB190-023-Q1-E1-B3
cggacgcgtgggcggattccaaaaccccgagaggtgggattgttgttgtctccacgagaccgtttgcgtctgtcttcaaagtatacaatttctttggttgttatagttgatttatataaacttggaatgggaacaaagaaacaacatattgtgagcgtttgtaggtacgagagaaaaaagggtgtcttcaactgtttattttcgatgaccacgctgcaaccgtaagtatgtagtgtaaacgcggtagttttgtagttttttgtgttctgtgaagcctgtcgcattacaaaaagtgacgagatacgtggatctgtaatcatattagcattgttcaaggaaacttcactgttactctgaacaagtggttatagttttcgacttgccagggaaaagtcaacagcctgacact

SEQ ID NO: 1223 - DNA, 435 bp, Cyanidium caldarium
  unsure at all n locations
  Clone ID: LIB190-023-Q1-E1-B5
cggaccgtaactcggaactaggtaaagaagagaggaagcaagctactttgaatagttttccgtttacacagagagtaattgctgctctcgtggacactggagacggtgactcgatggcttcattgacgacaaagataaagggaagttctcaagaagaacctttgtggaaaggattcagtgatagagatacacaaagatattatcaggaagtgtttgaagagagaataaaagaacagctgaaaaaactaggtctccttcaacctgaggatgacgactatgtgcagtcgaggattcgagaccttcaatggcgtttacgtacggcanaacatgatgctagaatccgaagaacaaacctgttgactagagtgacgactacggaatcaaagcggcaagcgactgcangagagattaaagctcacaatgatgatctggaaa

SEQ ID NO: 1224 - DNA, 419 bp, Cyanidium caldarium
  Clone ID: LIB190-023-Q1-E1-B7
ctgagatcttttatgagccgatttgttgccattcgttgttctcggatagattgacaggaataatagatatatacgtatatatatatatatatagagagagagagagagagagaaacaccaaacagtatagatagataggtacattgatagatatacatggactcgagtcaagcgtttgtgtccactagtgctctcaatcttatgtacaacaggtttgtgagttgcaaacccaacaacttgtgttatcgagaaaggctaccgacgaacatttacaagtcatttcaggccaagagaagtgaacaagatgaaaatagtttaccttggaggctaggggagctactatccccaagaaagcaatttgacaggattcagccaaaaagtagggtgccttctgatgacgcaatttgtatatgtggcac

SEQ ID NO: 1225 - DNA, 378 bp, Cyanidium caldarium
  unsure at all n locations
  Clone ID: LIB190-023-Q1-E1-B8
ggcaagttgagctttgttttggcactgtttttttttggggtttcactcgtgtgttttgtctttttaaaactcgaagaagactatttatttcttggtatgttttaaagtcttttctagactctgttttttggagttgttgtactccagtcttggtggttggtgaatggctctagtgacaaagagggttgtcactttgccgccattctccacagcttcaactaccaacttgtatacgtagacaactacataactatattactacagagtcgtggtgtaaaacgaaaagttgagtggttgaaaaggatggtgaaaagcaaaggactantgagagagagcactttgaaaccttgtaaatttgtaccccccaaaaacaatttc

SEQ ID NO: 1226 - DNA, 333 bp, Cyanidium caldarium
  Clone ID: LIB190-023-Q1-E1-B9
cgcctgcaggtaccggtctagagttcaaggaccgcttcggccaacgattcggcctttcctttgtcaattcaaggaaggataccaaaattatgaaacaagaacctgaatataattttggattgttattggatgctgccaaggcattagggatgatgggtgtatagccaaggatgtacagaaaggtgtgtgtaaatagacaagaggcatatttatgaaaagtttattgtttttttcgtgcaaatatgatttgtatcgtttatatcttgaatatgtgttgtatttgtttggcattttgcttggaaaagtaaaaattgtggagtttttggaatattt

SEQ ID NO: 1227 - DNA, 434 bp, Cyanidium caldarium
  unsure at all n locations
  Clone ID: LIB190-023-Q1-E1-C1
cttttgtatctcatcgtttgggctgtaaatgttgctaatggaacagggtaagcaacctaacattatatatgttgaaaactaaatgaacgaaaagaagctggtgtgagcatggaagtgcccactattagtgctgccaaacatgactctgaagatagccacgaagaagtgaggaagcggttgagtagagtaagcgctccaccgtttcccgatcctacttctctaggattatctggttttagttgcacaactttcattcttagcgtaatgaatgccaaattattgccagcgaggattgtaccaggaattgtagggcctgcctttttctatggtggaacggtacaaatgttggcgggccttttatgtnttgtcactcgtaacatgtttggattggtggcatttacttcatttggagctttttggcttgcggttgctac

SEQ ID NO: 1228 - DNA, 284 bp, Cyanidium caldarium
  Clone ID: LIB190-023-Q1-E1-C11
agcattcgtggtttagtccatttccgctgtggctgaaagacttgtgatattcctgtactagttatggagaaaggaactcgactggtatacaactctgcaaggagcttgcttgctagatatacacgcttgaatgctgcttccatcaaatatttccatacaccatctatggcagtttcgacctaccgtagtgtctttcaggcaaagcctttggttggattaaaatatgcaagttatctgtggaagagaagtttcgcaacaggaaaagatcttcgatttgctactga

SEQ ID NO: 1229 - DNA, 398 bp, Cyanidium caldarium
  unsure at all n locations
  Clone ID: LIB190-023-Q1-E1-C12
gtgaagtactttattgttacccaggttcaatatgcccaaagctgcgagtaaagaagagaagcccgcctcaaaacgcgctgtatncccctacaacgaatatatgaagaagatgcttcccgtcataaagcaacaaaaccccaatctttcgcatcaggaagcttttaagcgttgtgctgaaagttggaaagacgctccagagaatccaaagaaccaggcttcagcctaagttaggggttttctttgaattggtgtttctcaacaccaccaggagaaggaactagtctattttatatttcgctttgtgtcttcaagcacggaatatgaggaaaggtaaacttttgtcttatttggtccgtatgagtagttgcgtgtntgtaaaataaaatcacttttcaaca

SEQ ID NO: 1230 - DNA, 424 bp, Cyanidium caldarium
  Clone ID: LIB190-023-Q1-E1-C5
cccacgcgtccgtgagaagttgacctctgctttgccacctctttttggtatcgcttatgtgttttgccctttcaaagcttgaagactatttattctgcaatgttttagaggcttcttcagaggttttttgtactagtcttattccgtgtttcgtagtgggtgaaaggctcctttcacaacagcgttgtcatgaacccgccaatctccacatcctcaactgctaacttgtgcgcgtacgtagaagtatatttgtacagattcgtggtgtagaaagaagagtgcaatggttgaaaagtaacggcagagtaccaatgtacctgtagaggaaacacttgaaaaagggtcacgttcttgtacatatctacctataatagctgtttttgctcgtagagattgcaagtttagtgtacttgacaaggtttcc

SEQ ID NO: 1231 - DNA, 376 bp, Cyanidium caldarium
  Clone ID: LIB190-023-Q1-E1-C6
cggacgcgtggggagaacttttggatgatgttgagatcatcacgccacgcgagccgagtcaacgcggttgtcaactttctttgcgtttgaagaggcataaattgagggagattcacgaggctttgactggtagaggagtagtatgtgacacgcgtgaaccagacgttttgcgtgtcgcaccctttccattgtataatacttacatagaagtgttggagtttgtccaaatactttctactattttgcattcggccgaaataactgtacaagaacaatagattttgttttcttattcattatgaattttatgcttagaaacaatatgataaatatatttcgtggttgttttcgtcaaaaagtaatagcttgtttgcaa

SEQ ID NO: 1232 - DNA, 319 bp, Cyanidium caldarium
  Clone ID: LIB190-023-Q1-E1-C8
gcgaggtgtatgaggctggcccggatttgatgcagtctgtcaccgcattgtagattgcatatggtgtcacgatgggttgattaaagaagtatttgagtttggtagaacctgcaatcacacattaatgtcacatatgcttatagtaccgaccacttacggaagtatcatcgggaatctgacatgatgatagccacattgcacctgagtgagggtccatccaaggtaactcagcaatgtggaaccatgtgcaaagtacaaggaactacgacccagtcatgatgagtcgactttgcaagataagccttatgtagagggaatg

SEQ ID NO: 1233 - DNA, 436 bp, Cyanidium caldarium
  Clone ID: LIB190-023-Q1-E1-D1
cggacgcgtgggcgcagcgattccatgttgaaagagggtacacgtatattgtccgatctcaagtttcaggtgcttcaagatggaaaaccccaggtgataacttcggatcaagtattcggaggaaagaaagtagtattgtttgggttacctggtgcctttactccaacctgctctaggcagcaccttccaggctttggacagaaggttgatgaaatcaaatcgaaaggagtagatacagtcgcttgtttagctgtcaatgacccttttgtattacatcagtgggcagagtcacagggagtggcaggaaaaattctcatgttagcagatggtggtgcgcaatctgtcaagaaacttggactggatatcgatactggtgactttggtggtattcgttgtcgtcgattctcaagcttgattgacaattatgtcgtgaaaa

SEQ ID NO: 1234 - DNA, 392 bp, Cyanidium caldarium
  unsure at all n locations
  Clone ID: LIB190-023-Q1-E1-D11
gtgaaaggttcttattagagtctgcattgtcttattattcattccgagatttgacgagttggacatcttcggacatgatgtatgtaggagatgtatggacgaacaatcgctcttcgcaacctttcatagagtcganacccaagacgagtagtaatacgtcgaaacgtagtcgtacagttgtcgataagaagaccgaagctacgaatgctcctttatccagttctggtagtcttttggagagtttacaaactttgatgaatatgtttccttgtacaagtgatgttgctattcctgatgtgaattatgtgttgaaccttattttaagtacaccagagagcctgaatgtccaagaccaaaagtctcgaagggagaagaganagaatatgagtagt

SEQ ID NO: 1235 - DNA, 419 bp, Cyanidium caldarium
  Clone ID: LIB190-023-Q1-E1-D12
cccacgcgtccggaaaggaagacacagtaaatgaggcgagaaagcataggaagtgaaacggattaggaacccgtgtagtctatgcagtaaaagaaagaatgagtaagaaaaaagggagtcattccaccaggggagtaaaggcgcaagaaagaaacccaaagcaattgacgggaatcggtaagagatgaaagaccactgcatgaggataaggaatctaactgagtaaggaaaataagcttaagctagtttggctggggaagtaaagcctaagaaagagtaaattaggcaagcaaaggcatgagagaagtataatagcagaagcatgcttgaagaaaaagaaagagatttcagaaagggaagaaaagtcagctatagagaacaggtgaaggagaactcaaaaagaggagagcaccgaacga

SEQ ID NO: 1236 - DNA, 439 bp, Cyanidium caldarium
  Clone ID: LIB190-023-Q1-E1-D2
aggaactctgcaagagtattaatcctgatgaggcagttgcctatggtgcggcagttcaggctgctattttgactggtgatgccagtgagaagacgaaggatcttttgttattggatgtgacacccttgagtttgggtatcgaaactgcaggaggtgtaatgacaaaacttatcgagagaaacacgactattcctacgaggaaatcacagatattcactacgtatgccgataatcagcctgctgtgactattcaagtatatgaaggtgaacgtgcgatgacgaaagacaataacttgttgggtcgttttgacttgacaggaattcctcctatgcctcgaggagtacctcagattgaggttacgtttgatattgatgccaatggtattttgaatgtgagtgcagtggagaagagtacaataagagtaataagataactatt

SEQ ID NO: 1237 - DNA, 425 bp, Cyanidium caldarium
  Clone ID: LIB190-023-Q1-E1-D3
cggacgcgtgggcgatggcaggaccttggctcaagtatcgaggtcacctggataatatttccaacaacatgttcatcggtgctatcaatgcggaaaatggcaaggccaattatgtgaagaatcaattgactggtcaatatggtccggttcctgatactgctcgtgcatacaaagctgctggattgccatggattgttattggagatgaaaattatggagaaggttctagtcgagaacatgcagcactggaacctcgtcatttgggaggtgttgctattttggttcgttcttttgcaagaatccatgagaccaacctcaagaagcagggccttcttcctctgacatttgcggatccggcggattatgatcgtattagcccagatgaccgcatttctattttgggattgaaggacttgaaacctgga

SEQ ID NO: 1238 - DNA, 395 bp, Cyanidium caldarium
  Clone ID: LIB190-023-Q1-E1-D4
cccacgcgtccgcggacgcgtggggagacaattctcccaatgcggatgctgcagacgctactccaagaagccgtttattattgcatcaagtaaaagttgctctacagcatcgaataatgcagttagaagagcaactaaagcagttgagggataaacagagcacagaaagtgatacgaaaaccatctctatcgtcaaggaattgcaggttcatttggaacaagcagaacagagaatccatcagttggaagaagaaaaggaacagatcgcaattgcacatgatcgacttttggaagataatgcggcgttagaaactgaaaacgaacgtttacagttacagttgagacgggctgtagaagctgcttcatattatagtggtagagacactgtgtcccct

SEQ ID NO: 1239 - DNA, 319 bp, Cyanidium caldarium
  Clone ID: LIB190-023-Q1-E1-D5
accacgcgtccggaaaggaagacacagtaaatgaggcgagaaagcataggaagtgaaacggattaggaacccgtgtagtctatgcagtaaaagaaagaatgagtaagaaaaaagggagtcattccaccaggggagtaaaggcgcaagagataaacccacagcaattgacgggaatcggtaagagaggaatgaccactgcatgaggataaggaatctagcggagtaaggaaaataagcttaagctagtttggctggggaagtaaagcctacgaagagagtacatgaggcaagcggaggcatgagaaaaatacactagcag

SEQ ID NO: 1240 - DNA, 436 bp, Cyanidium caldarium
  Clone ID: LIB190-023-Q1-E1-D6
ctcaaattgtccacaaagccttgcatcacatttgggattggaattggaagacttttgtattggtagaagaaaagctgttttttccttggctccgaagcttgcaagtcaaatctgcgtatgaagggatcctctcagagctggaaaaggaacgccagcgtgtagtggatgtttcctccaataagcaacaacaaagtcactcgtcgcctcaacattctttcttttctcgttggcaagacaagtttgccaacattgttttccaaccttggtttctgtggaaggatagatcgaagcaaagggaatcagcctcgacagcgtcggttgctacgtgtaaaacatggaaagctgatacagaacaacaatatcaggagctattcaagacatatcgactcgtcaccttattgcatgacctgtgtgaccaatatttcgatcatgaaag

SEQ ID NO: 1241 - DNA, 344 bp, Cyanidium caldarium
  Clone ID: LIB190-023-Q1-E1-D7
gtggaaccgatgccttcccagcaaatacaatactctgaaaaatattatgacgatacctatgaatacagacatgtcatcttacctccggacatagcaaaactgctccctaaaaacagactattgtccgaagcagaatggcgcggtctcggagttcaacagtcaaggggttgggtacactattcaatccatcgtccagagccaaatatattgttattcagaagaccgaaacaaacagaggcacaacagactcaaaatagtatggttggcaaacaacaacaaaaccaagagcagagaccagttgacgtcgtcccctaatcattacgagtaaagttttattgaacttg

SEQ ID NO: 1242 - DNA, 418 bp, Cyanidium caldarium
  Clone ID: LIB190-023-Q1-E1-D8
acaagcttgtaagcgtcaccacaaaatacctatgggcaagattgatacaacccgaatgtggcaagttggcaagcaagtcagaaaaacaagagaggaatccagtattcccatcgttcctttttctgcaggtgtatacattgcagctatgatggctcagattgacattttgatggaaaagggacatccggtttcggaaattgtcaacgaatccgtcatagaatctgtagactctctcaatccatatatgcatgccagaggtgtttcttatatggtggataattgttctactactgcaagacttggtgcgagaaagtgggcacctcgctttgactataacatttctcagcaagcatttcctgttcttgacaatcaagaaccgtttgacatgcgcaagttggatgaattcctaagtcatcct

SEQ ID NO: 1243 - DNA, 418 bp, Cyanidium caldarium
  Clone ID: LIB190-023-Q1-E1-E1
cccacgcgtccgcttccaaagcgatgaacatgtggggagatcgtgctgccaaagtgctgagagaagctcagtatccagatacttggccttatacggaagaagacttttctagacttgacgaaagcaacgatcaattattttattctcaacctagattggtttatcatattgatgagtttgctataagagcactcacgaaattttacaaaaacaactttgttcctggtgctgatattttagacttgctcaagttgggtttcacatttccctgaggattacaaggcaggttttgtggctggaataggattgaacgagttggaattgtcaaagaattccagacttgatgaatatcatgtgattgatttgcaggagaatccaacatttccctatccaaatgatagattcgatattgtgacta

SEQ ID NO: 1244 - DNA, 66 bp, Cyanidium caldarium
  Clone ID: LIB190-023-Q1-E1-E10
ctcatggaggagttgggtacggagggagtccgaacgggatgggtatgggacgtatctggagtcctg

SEQ ID NO: 1245 - DNA, 372 bp, Cyanidium caldarium
  Clone ID: LIB190-023-Q1-E1-E11
cccacgcgtccgcccacgcgtccggcgtgctgagcagtacaagcctattgtagttgaatatttgggttgcatctttactatgtagagacctcttcatattactctaaacatcgatatattgtatggcttgttttgactgagaaagacttgtttattcacaaactattgaaaaatggagctgttgccttggagttgctcggaaaaggttggagctctccaaaagttacacaacctgcgcgttgtctttggaggtggaagcttctgaaatacttttgcagacggtttttggcagcacgttggttggactttggtggagtccggtatgctatcccttgcctctaacttacacacttggttcacaaggcactattt

SEQ ID NO: 1246 - DNA, 424 bp, Cyanidium caldarium
  Clone ID: LIB190-023-Q1-E1-E12
cccacgcgtccggttcccttgtgctgctgcggttccccaatggaatgacaacctctgctggcttgttggtccttacgtcactgtcactcgagaacacaacaactaaaaggaattccttttaaaataacaaaacaagatgctatagagagatttttgcattggtccaatagcaaccctttgggaataagattggaaccttgttcgctacagttgaaaactttgcacgtacccttgtttctgtttgaagcagatgttcattcagagtttgaatatgaaaaaacatcgatggggcgactattttatcagtctttagtgagccctcgaaagacttgtcattttggcgccaattatattcgaggcacagacaactttcgatacacttgtggaaatgtacatatgcagctgtatgctggtccccaacgct

SEQ ID NO: 1247 - DNA, 410 bp, Cyanidium caldarium
  Clone ID: LIB190-023-Q1-E1-E2
aagttttgtaccgtcacttgcaaaaagtaatcagtagacatcacttagcagccactgtccataaacgaccatcgtcataggtttgtacctcctggtgacgacattttaccccacgaaagtgtcgtccgaagtcacgggactatggttcaaggctcaagacttatttccactgtaacatgattggtagagcgagtgaacaaactcgtggctgttttgccgatacgagctcgttactcggctgaagttggggacgtagtcgttggccgaattcgagatgttgtagcaagaaaatggaaagtggatgtgaacgccagacatgacgcagttcttcatctttcggcagtcaatttacccggtggagttcatacaaggcgatcttacgaatatgaaccaaaaatgcgtgaactttt

SEQ ID NO: 1248 - DNA, 428 bp, Cyanidium caldarium
  Clone ID: LIB190-023-Q1-E1-E3
aacccttaaaaatgtcatcccaggaacggcttgtccctcgtggtgcctttgtgctctctgatgggaaaataactataagaataccaaatttaaagagacctatttatagaagaaactgcgtgcaccacaaacaaattacttgctcaaacacaaatgactcgttttcctgggaaggttggaaactaggccgtttatttcgacagtttttaaagaaaacaggacatttccctcttcacgaacgaaattcctacgttttcccccaacctgacagtgttctaaagttacctcccgcaaaaagtactcctgaacaggaattccaaaagttctcagaggaagcacgcttcaagtacagcctagaaataaagtcctcgccaacagcaaagccacaggagcaacttgtaagtatatctagccaaaacgccactcta

SEQ ID NO: 1249 - DNA, 418 bp, Cyanidium caldarium
  Clone ID: LIB190-023-Q1-E1-E4
attgaaaggagggtcgacgagctcagcttgaagaacaaagaacttgcgtggggttggacgttatttatgaacttggactctattgacacaggaattaatgctccttttgacccgtttgcagacgcctcacgtggagaggacgcagcagtaaccaaaaatatagtgcatattcgcgtgcaacaaagaaacggccgcaagtgcttgacgacgattcaagggcttgacacaaaattggatttgaataaaattacaaaggccttcaaaaaggagttttgttgcaacggttgtgtcgtagacgacgcagaactgggaagagtcatccaactgcaaggagaccagacggataaagtcaaaaagtttctagttcaagagaaattagctgaaaaagacctgataaaggtgcacggtatatgagtgt

SEQ ID NO: 1250 - DNA, 377 bp, Cyanidium caldarium
  Clone ID: LIB190-023-Q1-E1-E7
acgatacggcactaggcaaatggatatggtatctgcggtagaacatatgaaggaagcagcagcgactgtttagcaaaaacacagcactctgcataagagtcaaactgtgaagtatatactgtgcggcctgacaattattaaagaacaaatcgatgaaagtgaaaggccagtcaaagctagtgataactggtactcctcgaaagctgtataagtagcgtatgcaggaaagaagaccgtatcggaatagaaggaagaagcagagacggactatgatcgagaaggtggatattcgacagggacttagcccaatgtccaagagaaggtatcagagtccagaaccaatgaaaacgagaacaccatagggtacgcttagaatc

SEQ ID NO: 1251 - DNA, 384 bp, Cyanidium caldarium
  Clone ID: LIB190-023-Q1-E1-E9
tgaaaatttaatccaccgtggctcattcttgttgcagatatgacaggtcgtggtaaaggtggtaaaggtttaggaaaaggaggtgcaaagcgtcatcgcaaagtcttgcgagacaatatccaaggaataaccaaaccagctatccgtcgtttggcgagaagaggtggagtgaaacgaatctcaggacttatctatgaagaaacacgaaatgtccttcgtgttttcttggaaagtgttattcgtgatgcagttacttatacggagcatgctcgtcgcaagacggtaactgctatggatgtcgtatatgctctgaaaagttaaagccgcaccctttacggatttggacgatacaacctgcttgaacaaagggtgtttctcaacacc

SEQ ID NO: 1252 - DNA, 312 bp, Cyanidium caldarium
  Clone ID: LIB190-023-Q1-E1-F1
cccacgcgtccgtgtctttagatgcaagaagcattagctcgtcagaacccacatccacccgattaaggcattcaactacgtgagttaaatcaaaagaacgatttctctgccaaatattaaccagcagatacatcccatctttttcttacctcattactgtaaggatggaacatatactcaaaaaacaatcgaagtatatacttctcttctgtttcagaccattgtggattcgttgagccatcttcccaatcgagaacgaaaccaaagaggctgataattcggaataaacgactcgcatttaatcttctattg

SEQ ID NO: 1253 - DNA, 244 bp, Cyanidium caldarium
  Clone ID: LIB190-023-Q1-E1-F10
cggacgcgtgggcggacgcgtgggcggacgcgtgggtgcgactcacaggcctgggtggaatttaaagatctttccattgcatgccagataaagtaaatttttaaaaaaaaaaaaaaaaaaaaaaaaaaaaaaaaaaaaaaaaaaaaaaaaaaaaaaaaaaaaaaaaatggcgaaaaaacaaaagaaaaaaaagcatcaataaaaaaggaaaaaaagtcataaatcacctaaagtgtaaacaaaa

SEQ ID NO: 1254 - DNA, 378 bp, Cyanidium caldarium
  Clone ID: LIB190-023-Q1-E1-F11
caaaaggagtccaaactcttcgaactgctatgcgttttacataaaccggcaatgcgacggaaaccttgaaattcaagttgcttcctttttacccgtttagcttgataaggggtttgcgttgccaagatggagtatctgcgcatacgtctatgcgaaagagaaagactagggcaaaagaacgaatgtaattcgataaagagtaaacatgcatagcactggtattagagcaaccgctggttggttttttacatagtcaactgaacatgccttggtatcttgcgagttgagctaccgttgaacaaagttaccaagccattttggaatcgtttaggctttatgtcgagtggtaattcaagtacattttaaaagaatgctgct

SEQ ID NO: 1255 - DNA, 402 bp, Cyanidium caldarium
  unsure at all n locations
  Clone ID: LIB190-023-Q1-E1-F2
caactggaagccaacgtttctactccaagcaatcgcgtctctgaattagaaaggacatctaatgtagatgtcactggtgggtcttcttctcgattggatagcagttttgatggcgcagtggagtcggcaaacaaaaaggacttcgagaacgacgaagaggttgtggtttacgtggaagatgatgagtgggctagtcctatgcgtttttatgcatatcatccagaggagacagacgaagaacctcaagagtcgaaggcatctccagaacgagaaaatgcttccaaatcgacaccgattgtgcagcaagcgtcttccactgcnacaaataactttcaacataccgcaactttaaagttgtaagatgcaaaagtgtggtacagttgttacttagtcagttaactg

SEQ ID NO: 1256 - DNA, 415 bp, Cyanidium caldarium
  Clone ID: LIB190-023-Q1-E1-F3
cccacgcgtccggaggtgagggatcactcgggaaccccaagtgccgtacgtttttgctatttctcttgtataggaaagaaagtatctgagaagaattaaggtagaattgaaaatttttcaagtatttcgcgagtaataatatctgctggaatacttttcaactactagaggttctttttgcttgacgctgtttgaaaacaacggaatgattcttgtcctgaccagtcgatactgtcaagtgatgactcgaagaggtatccaataacttgtattttccatcgtttaacaagaggcttgttgaaaaaaagcagcggataactttgtgcggattgcgtcggcttaagttgctcacttttctgctgaccaagaggcttcaaaacttgcagtcaagatagcaatatattctcactgagga

SEQ ID NO: 1257 - DNA, 349 bp, Cyanidium caldarium
  Clone ID: LIB190-023-Q1-E1-F4
aataacttgaatattgaagaagagccgaatgagaacccaatgaatactttggcagcaatttcagagtcgcgactctcctttcaaatgaagcagtcctccgtgggcacaagttatcctccacagaacactgcacaagagtccagtagtggaggtgtaaaaagtagcattcacaatgaagagtcagttaggaagtctggaagtaaacgatggttgttcggaacaaaccaatccatatgtgcattatcagagaaaggtggcaagaaacctcgtcctcggggatatgtagtgaacgataatgatatgcctttgatggaaaactcaatcgacgcattccaaagctgcagctaaa

SEQ ID NO: 1258 - DNA, 445 bp, Cyanidium caldarium
  Clone ID: LIB190-023-Q1-E1-F5
atgtctcgtcccaagtgtttctttgatattgctatcggtggacaacctgcaggaaggattgtattcgagttgttctccgatgtcgttcctaaaaccgcggaaaatttccgtgccctgtgtaccggtgagaaagggtttgggtacaaagactccaagtttcataggatcattccccagttcatgtgccaaggtggagactttacacgcggctatggaaccggtggcaagagtatttacggcaccaagtttgaggatgaaaacttcaagttgaagcattcggagccctttttattgtccatggccaatgcgggaccgaataccaacggaagtcagtttttcattacggtagtgaagacaccttggttggatgggaagcatgtggtgtttgggaaggttgtagaaggtacggatatcgtgaaagctatggaagctgtgggaacacaaa

SEQ ID NO: 1259 - DNA, 270 bp, Cyanidium caldarium
  Clone ID: LIB190-023-Q1-E1-F6
gtaagccaagtcatttggctgacaagagactaagacggacttgtctttgcgtttcgtgtcacagcccttcaagtgactctgagcaacagttggcctgttttcgttggttgcgtgatatgcagaatattgtaacgctgcttcttattagtggtttgattccaagtccgctcgttaatgtaagcggtgcagcagcaagttctttttcaactatgtacaatgtggaaaaatatgaaagccatccttctgttttggttggtttgttttgaacaa

SEQ ID NO: 1260 - DNA, 411 bp, Cyanidium caldarium
  Clone ID: LIB190-023-Q1-E1-F7
gtgaggcatgggatttgcagagttcgaacgctcttatgagaagtatacaggaggtgatccatcgagaatgaaagtgtccgtggagaaactagacgaagagccacacgacgatcatagaggttccacttcataaaagagactattgtgcacatttgtatattcctttgcgccgttgtttgagagacaactattttttgccgtggtcttgtgaggaagagaaggaggcgtataaccggtgccaaagaaaagagagaagaagaagagaacgactctataagaaaatcaaggaagaggcctccaaagtatcggcgacggaagaacaagatgaataatatcgtgttggtgcgtcgtctttgtgttggaacaataataactcctcaaatagtaaacaacttgatttgattttcaagt

SEQ ID NO: 1261 - DNA, 440 bp, Cyanidium caldarium
  Clone ID: LIB190-023-Q1-E1-F8
aaattttgtgtttaatggaatctgatggaatagagccggatagagttacttataacaccttgataaaggcatatggctacatgcgtcggcatgatctcgcagaagctacctttaagcaacagatttccaagtttggaccgcagttggttggctttaataccctaatgaatggatactgtgaagacaaaaagtttgctcgtgtcttggaactatttgcgcaactcaaggaattgggtttgaaaccagatgttaaaacgtattctactattatcaagggacaaatattgtctggtgagaattcatctacagtcatgtgttggtatcgacagatgacagacgaaagtgtttatccggatttgaagcttgcttaatctgtactaacctttttcaacagaaatacatgtgcagaaggagtttgtcctgtgttgaacgacttgcct

SEQ ID NO: 1262 - DNA, 407 bp, Cyanidium caldarium
  Clone ID: LIB190-023-Q1-E1-F9
ccaacccttcggggcaaatttccggacttggggatggaaaatcctccttggccaaaacaccatatttcattgcaatggaaaccgacatatttacaaattgttaatccgccttgttcattgaaaaatttgcttggtttacaattatccaatcaaaagcgacattggatagtttctctttcacaatttcgagaagaaaagaatcacgccttacaattgtatattattcatgggcttattcagcgacatgacgaaaaggatcttcaagatttatgtctcgtgatgatgggcagtacacgtaatgaacatgatgcagaaagagttgctcaactttgtcgtttggcagatgaattgaatatcacatgctacattcgtttcatcgtcaatgcaagccatgaagaaatttatga

SEQ ID NO: 1263 - DNA, 419 bp, Cyanidium caldarium
  Clone ID: LIB190-023-Q1-E1-G1
tggagattaaggctgagaaggagcagtagttcgcttccggagcctgaaacaaacactcatatatacatatacatatatatatttcctatatatatagctattcttcaaatggtttccaaaaagacgaaaaaatccaccgaaacagtctcttcaagattggctctcgttatgaaaagcggaaagaccacgttgggcttgaaaagtacgttgaagagccttcgtcagggaaaaacaaaactcgtggtcttggcaaataactgtcctcctcttgtgcgctcacagattgaatattactgtctactcgccaagtgcaacgtacaccactttcaagggaataacatagaactaggaaccgcttgtggaaaatacttccgttgtgcttgtttaggaaattttggacctggtgactctgatattct

SEQ ID NO: 1264 - DNA, 340 bp, Cyanidium caldarium
  Clone ID: LIB190-023-Q1-E1-G11
gttgtggagtaagtgcgcttggcaacaaactaaaagatggcaagaagaatcatcggagcttatatgtctgacgctactgtagcgtctctatttagtgtgaaaatgttgttctaccttacaatacttgcgttctctatcactattgtgggtcttatgggtaagagttccgacggtatttgggttcacagtgttccagcgaaagacgaatattgtgcatacaagtcttcccttcaagtaaaccaccacggcatagcttcctattgcaagtatatcatggctgtagcagctattggtttggttatcagcttcttcgagttttggtatgcattcctcggaattt

SEQ ID NO: 1265 - DNA, 362 bp, Cyanidium caldarium
  Clone ID: LIB190-023-Q1-E1-G2
aaaacattggctgatagatatgcgtctcaagcagttcaaacaaagactgtggaaggttgggaaacaaccgctgatttacgaaaaaagttgattgcgactcatattaacgctctccctgttcgtttccaacgcgcaagagaagagttgaaggattttgtacaaaagactcgtacgttggactttacgtatcttgatgcgtttcgttttggtttccgaagcttagagttggcggcatggtactggatcggaaagaccttggggaagagggaacttcccaactcgatatgaagtgtgtcttcggcaactcttcttttctcggaaatacaagcttttatgtgctcgtgttttataaaatatagttg

SEQ ID NO: 1266 - DNA, 432 bp, Cyanidium caldarium
  Clone ID: LIB190-023-Q1-E1-G3
ctcagcttgaggaacaaagagcttgcgtggggttggacgttatttatgaacttgggctctattgacacaggaattaatgctccttttgacccgtttgcagacgcctcacgtggagaggacgcagcagtaaccaaaaatatagtgcatattcgcttgcaacaaagaaacgggcgcaagtgcttgacgacgattcaagggcttgacacaaaattggatttgaataaaattacaaaggccttcaaaaaggagttttgttgcaacggttgtgtcgtatacgacgcagaactgggaagagtcatccaactgcaatgagaccagagggataaagtcaaaaagtttctagttcaggagaaattatctgaaaaagacctgataaaggtgcacggtatatgagtgtcgttgccgtgtaaagaaacaaagcagtcgtcagtg

SEQ ID NO: 1267 - DNA, 436 bp, Cyanidium caldarium
  Clone ID: LIB190-023-Q1-E1-G4
atttcttttgggtgtgaagagttgcgcaaaagagagaaagagagagaaatggcaacgacgagtggaagaggaggaggaagtggcggtggtcttaccggacctccaaaaccaccacctcacgcagcaatacaagatggacctcctcctggtggttatccaccggtggatgttcgtagaaacttgcccaaagttgggccttccggtactactttgttgataggcatcggactgatcaccatctatgggttttggggagcgaccaaatcagctcaacgtagaagaagactgaaccaggaaaagtatcaaattcgattggctattacgccgtatttacaagccgaacaggaccgtttggaagttaaagagacgcatcgtcgccttcgtcaagaagcagaacttatgaaggatgttcctgaatatcaaccgggagaaaatt

SEQ ID NO: 1268 - DNA, 444 bp, Cyanidium caldarium
  unsure at all n locations
  Clone ID: LIB190-023-Q1-E1-G5
ctcttcgactgtatcgcggacatagaatggcaacagataaagtcagctaagaagatatactcttatgtaaaagaatcaaaaaccaaagaatatttggagctagacgattcgttgcagcagccagtggattcatcttgtagcaccaagtggctgtttattgcaaccccactgttggaagttgcttgtactgatgggcagcgaattgaaatgattcctttgaagaaagatataaaggaattgtttttctctactttaaagaagaactttgagtcgaacgaagcgtcatgggagtgcagtgtagttgaaaccgcagttgctgtttttatccagtattatgaacagtgcgtggaacagtactatctagcaggcaaagattatgagctacctggttattccanagtanaacagattcggagtatgattgaagatgttctacaaatagag

SEQ ID NO: 1269 - DNA, 413 bp, Cyanidium caldarium
  Clone ID: LIB190-023-Q1-E1-G6
cggacgcgtgggcggacgcgtgggttttttgtaaactcctagtcagtcaacattttcgcgtttgatttatgtttttgttctccaaaggcagagttatttgtcgtttgacgcagttggaagtgacgatccttttcagatacataaagactatatggcttccatgaaagtttttataagagaaatcgacagtaagttagctatatttgacctgtcaagagctaagtgataccgctgaaatgtttttctcaactttaaaaaaagaactttgagtcgaacgaaacgtcatgggagtgcagtgtaattgaaaccgcaattgctgtttttatccagtattaatgaaacagtgcgtggaaaaagtaaaaacgagggggcacccattaaggatctacctgtttattccagggtaaaacaga

SEQ ID NO: 1270 - DNA, 425 bp, Cyanidium caldarium
  Clone ID: LIB190-023-Q1-E1-G7
cccacgcgtccgtgccactgcacgtgttgtttgttggggcaacgaaaaggataagagaggaaggggcaatgcatatatgaaggaatggagggaaaatcttgtgtaggagacaccctaggaaaaccgccaaatataaaagatatacagcaagacaaggagaaccttttagaatcctggacggaaacgagtctttcatcaagaattgctcaaaagtggggaaagttaccgagtaccagtttgttttatctacactctccttctactagtattgctcataaagagtctctctcggatgagaacgataaaaatcgcatcgatttggaacaactattgcattctacaaagtccctttctatttcggacagccgctatcctttcagagacgaaaaaagcaccaaccatcgacaacatttattactagatac

SEQ ID NO: 1271 - DNA, 406 bp, Cyanidium caldarium
  Clone ID: LIB190-023-Q1-E1-G9
ccaacgcttcgggaggaacgatgaattggcaaaccggtcctaggaatacaattgttaaaaggatacaaacgctacggcttttctggttgattatttgcaacgttttcccatatagttactctatacaattttatatgaacgctggaacgaagcgttgtctttcggaagaaattacctcaaacacaaaggtgtttggtgaatgtcttgtagtcggtgcggaaggctccatgtccgtagatctgttgattcgaggacctcaaggggagactatagtgcaacagaagaacatagataagcagtcatttagcttcacaacaccacagcacgttcttgctggagattcgagtttggcttccaacgatattcactggcctcctgcaagttatcacttttgtttcgaagctag

SEQ ID NO: 1272 - DNA, 338 bp, Cyanidium caldarium
  Clone ID: LIB190-023-Q1-E1-H10
tcagcccacgagtccgcccacgcgtccggtgctgtaaagtgagaaaacgtacgagaaaacccaattgaggaaaaaaaggcaagtaaagggcggcccgaaaaaggaaagggcgtaagacgtgatacagagtaggaaaaacaaaaaaaaacgcaaaaaaaaaccaagaaaaaaacaaaagcaacaacaggaaaaagcgggaccagcaaaaaaaaccgaccgaagaacaacagcaaacaagacgcaaagaacccaaaaaaaaaaaggggggcccccccaaaagtttcaactttatttaccccgtaatgcgaggttaaaacccctcaaaaaggcccccaaaa

SEQ ID NO: 1273 - DNA, 237 bp, Cyanidium caldarium
  Clone ID: LIB190-023-Q1-E1-H2
ccgccaagctttcacctcttcgagaggaacgtaatccattgaccaagtgtgagaaccaaagtccatggaaaaggaacaggaaaggccagacaactacccaggaggtctagagtacatcaggaaccacacatcacggcagtatgactccgacacggagtaatgtgaatgaaggcaggaaactcattcaacacgagagtgtaccgcgcgtaccttttccataatgtcccagcgagtgac

SEQ ID NO: 1274 - DNA, 416 bp, Cyanidium caldarium
  unsure at all n locations
  Clone ID: LIB190-023-Q1-E1-H3
atcagcttgaagaacaaagaacttgcgtggggttggacgttatttatgaacttggactctattgacacaggaattaatgctccttttgacccgtttgcagacgcctcacgtggagaggacgcagcagtaaccaaaaatatagtgcatattcgcttgcaacaaagaaacggccgcaagtgcttgacgacgattcaagggcttgacacaaaattggatttgaataaaattacaaaggccttcaaaaaggagttttgttgcaacggttgtgtcgtagacgacgcagaactgggaagagtcatccaactgcaaggagaccagagggataaagtcaaaaagtttctagttcaggagaaattagctgaaaaagacctgataaaggtgcacggtatatgagtgtcgttgccgtgtnaagacac

SEQ ID NO: 1275 - DNA, 401 bp, Cyanidium caldarium
  Clone ID: LIB190-023-Q1-E1-H7
gggcgccattacatacacaaggcgttgtggtggttgctatgcagtacataaaccgaatcaaagtgaagttttctcaaaagaaaacaagttcctcccctgcacatactatttcagatataagggaacacattgaacttcttgagaggaagcagcaattacagcaagcaaaagtggatgccgaggtacaaaaggccaagaaacttttaatgcaaaaggatagaagaggggcccttatggcgttgaagcgaaagaagcttcttgagaaggaaattgcaaacacggaaaatattcgttacaacttggagctacaggctctcacacttgagaatgcaaacgcaagtgcacaaacagtggacgcctttcgaagaggaaaccaacagctgagaagggctcacgacaag

SEQ ID NO: 1276 - DNA, 244 bp, Cyanidium caldarium
  Clone ID: LIB190-024-Q1-E1-A1
cccacgcgtccggtcgaaagtattgcatatcacgttaggtcaagagtgacaatgcgagtagcagtatgagtctggactttttggtcgcagctttggtttttacacaattcaacaccgcacatgaaacccatagtgtcagtagaaggctgcgtaaccatgacgtcatgtttacgcattcgtcgacacattgagtgcaatgactatgggagaaagtcctatatgactccagaaatcgcatacattt

SEQ ID NO: 1277 - DNA, 414 bp, Cyanidium caldarium
  Clone ID: LIB190-024-Q1-E1-A10
tgtatggagaccaggcaacagctctcgttcatcatctgtataagagttcatcgttgcctccttacaaagaagatgcagttcgtcaagtagtgcaagaaatagaccaactctatgcccaattagtacaacttttagaaacagccaacaacgaccttagtgacccaaggataggaggaacagctatattctttcatcgagtcattcttcgtaataagcgatgtgttcttgcatacttacttcataggttttatcgtttgcgcgatagtagatatctcgtaatggatgaccgaatagaagaaaatttaagtgcttctgaacaagaattgttgacaaactatgaacaacttgtagccagctacagtgataaggtgcaaatagacattctctcgtcgttgtatccaactcgagcgttgt

SEQ ID NO: 1278 - DNA, 369 bp, Cyanidium caldarium
  Clone ID: LIB190-024-Q1-E1-A11
gaggaccgaatcagggtaagaggtacaggagcaagaagagaagagagaatgctgggtggagtagcgaaacaagagaagggaagtaaaaggtaagaaagaggaaaggtttacgagagaaggaagtagaaagaagagagtgtaaggcggcgtcataatagaaatccgaaaggagtagaagaaaagagagagaagaaagaaaagaagagaaaagccgtactgaagaccgacacaggtactcgaggagaaatgagacccaaattaaggtgagagaatggacgataaggaactaagcaaaaggatatggtatctgcggtagaacatatgaaagaagcagcaccgactgtttagcaaaaacacagcactctgcag

SEQ ID NO: 1279 - DNA, 362 bp, Cyanidium caldarium
  Clone ID: LIB190-024-Q1-E1-A12
ggcatattaaaaatactgcagtcttgtgaaagctttctttctccttgtcttgataacaaacgagagaggaatgaccttgaataaacgactccactttttctcacttgaaaaaaaaaaaaaaaaaaaaaaaaaaaaaaaaaaaaaaaaaaaaaaaaaaaaaaaaaaaaaagaaaaaaaaaaaaaaaaaaaaaaaaaaaaaaaaaaaaaaaaaacaatacggaaatactaaaagaagtactcgatgaaaaaagatacccaacttaatgagagacaatggacgataatgaactacgcaaatagatatggtatctgctgtataacatataaaagaagcagcaccgactgtttagcaaatacacagc

SEQ ID NO: 1280 - DNA, 413 bp, Cyanidium caldarium
  Clone ID: LIB190-024-Q1-E1-A2
agctcttttctgttttgttgagagttgttgcttggagactaagtcatatcgatcctcatataaagttattcttccataatgacaccaacttgtagtatacatagactcctgaaacagttcatcgctggaaagtattaccggcaggttggttattaagtcctttactgtttctgggcggggaatatttgttatcaacatatgatgcaagacaaagtacaaatgagacatcaatacgtttggcgcctagttggagtgttttaaggtggcgtgtttctgctcacttgattggcacatagatagcattccttttagcagctatctttgcgtaatgtgggaaactttcagtcggtatgcttaggcatgacttttactatcactgtatgggtagttatcacccctccgaagtcctaaat

SEQ ID NO: 1281 - DNA, 450 bp, Cyanidium caldarium
  Clone ID: LIB190-024-Q1-E1-A7
cgccggcaggtaacggtcaaggggtcgagggacgagtcagtttcgattggaaaaaagcccaactatgctatcttggctcccataaacctcgcgtgttctttcctcggttgccttttgaacctaaatggtatagagtcacgaataacatagaacagtcattgtctctcaatgtcttcccttgtctgactgtagtttttctttggttttgcaagtgttgaaggacatagctacgtgctgttgtgactgcttctttcgacattgtttttttcaggatacatcttgctgtacattttttcatgcatacctagagacttacactggtagctaccaagttaaaagcacaggtcgatacaagtcaaaggcactagacaaaaccgctatctacttttccttcaacgatgcgactagaaagtgacaagtcaatttgcaagtggtagttttgcaactgcg

SEQ ID NO: 1282 - DNA, 440 bp, Cyanidium caldarium
  Clone ID: LIB190-024-Q1-E1-A8
ggggccaaccaagcctccggcttggccgaggaaaaggatcctcctggtccccaggttggtggagtggtttcctgcactttgggaagggaaacaacaagcaccaattactcaaagaatttaaagttacactggataactagacactggatatctttgaaaatgagacgtcattcttccccagaccaccacaccgtaaagttgcctctccgcatgatgaactcggagaacaagacgcgaccccgttacttgcaggagttgcctttgattcctatcgacgagctatactcgaaaagttttcgttggaatcgaattggttgctatgccgtgtacaacggtgaccaagcactttgttatgtacgttacaacatacacttgcaaagaaagattgcctttcacgccatgttgcaaccagacaattgcaaatttttcagagcctttgt

SEQ ID NO: 1283 - DNA, 430 bp, Cyanidium caldarium
  Clone ID: LIB190-024-Q1-E1-B1
cccacgcgtccggaacgttggaatgaatatttagattgggctgtgaaagcttttcgtcttagtacggtcgttgcagcacccaagactcagattgtcacccatttatgttatagtgactttcaagatattctaaaagccatcgatgagatggatgccgacgtattaaccattgagaatagtcgtagtgatgatgccatgttgcgtgcccttgccaagtatggttattcacgtgatgtgggacctggagtctatgatgttcattcaccggctgtaccgagcatcgaatttttgaaaaagaaaatggaaggcttcaaaaagtctggtattcctttggaacgcttatggattaatccagactgtggtttgaaaacgagacaatgggaagaagttattccttccttgagaaatatggtggatgttgctgtgcaat

SEQ ID NO: 1284 - DNA, 426 bp, Cyanidium caldarium
  Clone ID: LIB190-024-Q1-E1-B10
agacttgtagctgttgtggtagttttatcgagcgtatgtcaagatgttgaagaactggtaaagctactgttgacgaaactggagataagccagtctttgcgtaggaaatgtttcgcaaagttttacgagttgctaactcgaggcgtattactggaagctggtcttttgcatgtcctcttgttggtatttccaacttatccatcgcattcttatgatgttttccataatgctgaagatgtagttatgttattgtatagacaaatgcgttgccatgagaaccttattgacctgcagagttgttttctaacttttttgatgaaatggattcagtactttcctgaaacaactgatgtggtactaaaaattttcaagcgttatgcaacccatcaagatcttgaagtacagaaccgagcatgtgaatatatg

SEQ ID NO: 1285 - DNA, 411 bp, Cyanidium caldarium
  Clone ID: LIB190-024-Q1-E1-B11
gaggaacgatgaagtggcaaagcggtcctaggaatacaagtgttaataggatacaaacgctactgcttttcttgttgattatttgcaacgttttcccatatagttactctatacaattttatatgaacgctggaacgaagcgttgtctttcggaagaaattacctcaaacacaaaggtgtttggtgaatgtcttgtagtcggtgcggaaggctccatgtccgtagatctgttgattcgaggacctcaaggggagactatagtgcaacagaagaacatagataagcagtcatttagcttcacaacaccacagcacgttcttgctggagattcgagtttggcttccaacgatattcactggcctcctgcaagttatcacttttgtttcgaagctagtcctcttcgtcctcctc

SEQ ID NO: 1286 - DNA, 435 bp, Cyanidium caldarium
  Clone ID: LIB190-024-Q1-E1-B3
cgatgacttttgtgtgaaatagtaaagccgttgagatgcagacctttttggataagacgtgtgagacgacatcgacgtttatatagtagagcttttattgttgccaactttttctttctctttgcagttttttatacgctttcttccagcagtctgtactatcatagatatcttcacaggagtagtgtcacgaataacttggtagcaacgagtaggttggtagctctagtgtcgtcaggttggggtttagatcacttgctggatattcctagcgctgccttgaatctcagaagtgtcactgctttggacagtcttttagagtctgtgaacaggaatagagattggtcagtaagagtagtaataactcattttatggtactgaagaagccagatgtgaatacaatgacgttgttgttgcactgtcccacaagtaat

SEQ ID NO: 1287 - DNA, 437 bp, Cyanidium caldarium
  Clone ID: LIB190-024-Q1-E1-B4
cccacgcgtccgcggacgcgtgggtttacgattcatgcaggtgtattgttgagatatgttccgttgactgccaatcggttgacaggtattgtctcccgaggaggatccattcacgccaagtggtgccttgcacatcataaggaaaactttgcatacgaacattgggatgaaatttgtgatattatggcgcattatgatatcgcattttctataggagatggtcttcgtcctggaagtattaaggatgccaatgatgaagcacaattcgcggaattatatacacaaggagaacttacaagaagagcttgggaacatcatgttcaggtaatgaatgaacgacctggacatgtgcctttgcacaaaattccagagaatatgcaaaagcagttggattggtgttcagaagctccgttttatactttgggtcctttaactac

SEQ ID NO: 1288 - DNA, 438 bp, Cyanidium caldarium
  Clone ID: LIB190-024-Q1-E1-B6
cggaagagactacacatgagtagatattggacgttggaagaacatgaaaggttccttgaagcaagaaagatatatggtactagagatacaaaatctatagcagagtatgtgggcacaagaacagttactcaagtaagaacacatactcaaaaatttgaaaagaggttggagttggcaagaagaacgggaggaccagggtttcgtgttcgttccaaaaagagtagtcaacgcaactggagaaataggtgttttgtagacaactggagaaacttacacgatagttgcttgagttcgaatagtagcagtgttactgtccaaaaaaatgaagaagacacacaacctgctgagtatcatgcggatatccatagtccatcttccattcaacaaacagatatgtgctcaaacactactgctgcagaatcagattctttcgagctc

SEQ ID NO: 1289 - DNA, 442 bp, Cyanidium caldarium
  Clone ID: LIB190-024-Q1-E1-B7
cccacgcgtccgcccacgcgtccgcttgtgcgcattgtggattggagagttggtgacgttgcactgcgatccacgacaaccaaaagaacaagaaagaaagaaacaaaatgggatggtggatactttctcgtctcctttctcgtgtacgtcgagtggctgcaatggacgatgcttgttcatggaaaagccaaagatattttagtcgtcgagcacctagaaagaagcaagtagaggatgatctcttcgacaatagcgtaaaaaaagaaccgcgaaaactttcagaatttaacctttatatgaagaagatgttgcctgtgatgaaacaacaacatcccgaactgagccatcgtgaagtatttaaaatgtgcgctcaaagttggaaacatgccagtgaaaatccaaagaaacggagatgagtgttgtttgtacgtacgctttcgta

SEQ ID NO: 1290 - DNA, 439 bp, Cyanidium caldarium
  Clone ID: LIB190-024-Q1-E1-B8
gtcggccaaggcgtccgataactttggtgcattattgccagtgacagtagaagaaacataacaagtccaaactttttggactcaattttgatttctatctaaactggcattgtaaatagaactcagagtgtcaagttacccctttttgtaggaagagagtgacaatggggttgcgttaccaaggcggcatgtctacgcagtcgtcgacacaagaaaaaaagaccaggtcaaaaaaccgaatgtgactcgataaagagtaaacaagcgtagttcttgtaacgtagcagccgctgattcctcttttacatagccagctgtttgtgtcatcgtctcttgcgtaggttggctccggtataacaaggccacaaagccaatcttggaatcgtccgcgctttatgccgattgatgattcaagtttattttgaaagaaaaacaacgc

SEQ ID NO: 1291 - DNA, 384 bp, Cyanidium caldarium
  Clone ID: LIB190-024-Q1-E1-B9
cccacgcgtccgagaatatcaaaagagatggaagaagagcactgttcttgacacttgcaagctttattgtagcaatcagttttttccaaggtcgatagttaacactaaacagtcgatgaacacgacttgtttatgtcctacccgtaagctaagggagaacaacggaaacggtatagttttggtaaactgtggttctttctcacccataacacttgcacatcttctgttaatggaatctgcgcacaattttgcagtttatagaggctttcaagttctaggcggctacttatctcccgttcacgactcttatcgcaagacaggtcttatccatagtagacaccgcctagagatgtgtcaactcgccgtagaggactcttcttggct

SEQ ID NO: 1292 - DNA, 441 bp, Cyanidium caldarium
  Clone ID: LIB190-024-Q1-E1-C1
agttgcggttgacgtggggtagtggtcaaccaagagtccttgggacacaaactatgtccacaacttcataagtttgtaaagtttgagtacttgcaatgagctatctagtaggaaataccgaacaagacttacaagccaagaaaccaacatatgaagaactggtggccgaactatctcaactcaaggcggatttattcgcagaaagacacaaaagaaaggtagttgaacaagagttgaaagagttgaaacagttgtcgttttctatgcaaactcatatcgaggcagaagaggagtatattgcgaataaactcataaaacggctcacagagttgaaagaggaaaaggaacgcttggctgtgcaaatagagcaagaagaagagtatttgacgaataatttgcaacaaaagttggaacaactacgaagagagaaagtaaatattg

SEQ ID NO: 1293 - DNA, 434 bp, Cyanidium caldarium
  Clone ID: LIB190-024-Q1-E1-C10
gcttgacgtacaaaatctccatctacagtgtgtcgtaaagggtctgagctttactattctgcatatgcaaagctcagtcgcaatttctactgttcatggaggaagattcacgcaacagtaacgtctttttccgactggacggaaacaagtttcggagagtggctttattgggtgcaaaaggggtcgggaagtcatccattgctacccgctttgcagaagacacctttttggactcgtaccttccaaccatagaggattcctatcacgcgacttgcagacacaaaaacgaaacttacaacttggagatattggacactggaggacaggacgaatattcctatctcggaacacagctgactatcggagtagatggatatgtgtttgtttattctatttgcgacggtgcttcatttgatatgattcctgttgcccat

SEQ ID NO: 1294 - DNA, 355 bp, Cyanidium caldarium
  Clone ID: LIB190-024-Q1-E1-C11
cccacgcgtccgcccacgcgtccgcccacgcgtccgaaattgtgggagagcgagttttgggtattttgtgtcctcaagcagtcatgttgggtttcctaccgactatatcaactgtttccccctaggacaaagtgaaagttgccactgttcccacgtatctaaatacagggtaattatagaaaatagtgttttttggaaagagaggtaaccatataaaacaaaggttgggcagcgttttgtcgcaaaaaaaaaaaaaaaaaaaaaaaaaaaaaaggcaaacacacaaaaaaaaaaaaaaaaaaaaaaaacatgaataaaacatcagaaaggcataaaaaatgtaaactcacaacaa

SEQ ID NO: 1295 - DNA, 415 bp, Cyanidium caldarium
  Clone ID: LIB190-024-Q1-E1-C12
cccacgcgtccgcccacgcgtccgcggacgcgtgggcgagttggcaatgagtgagttggtgcgacctggtcgtttctttgatagcggctttggtgacttattttcttggacgaatgaccccttcttccgtgatgcatggaacttgatacctcgagtaggtggagctgagtctcagttatggtcgccgagaatcgacctcattgaaaaagaagacgcgtttctggtgaaagctgaggtacctggagtaccgagagaaaacattaaagttgacttgaaaggggatatcttgagtgtgtctggagaaaaggctgacgaaaaaaagtcggatgaagaacgagaaggaacggtattccataggatggagagaagctacggaaaatttgaacgaagtatacgactaccaaagcagattgac

SEQ ID NO: 1296 - DNA, 421 bp, Cyanidium caldarium
  unsure at all n locations
  Clone ID: LIB190-024-Q1-E1-C4
agagaagcctcgtgtagtttctgtgcgtgtgaaccctaacaatcccatttctctttctagtgtcaaaactgcatcgctacaattgcattttgtttgtttgaatgacgtgataactttatcttttctgtaccgaccacttgaattttcattggtgaagaaatgtcgaaagccacagttgagacgtgcccaaggcttcactgtatatcacgcaacgagcattgtcgttgtattggcattatgtattgcagctttcagtggatatttgttttatcgacgcacgaaacgacagtcaagactctctacgacaaagggagactacaggcctcttcgactgaacatgaataattttaactaggcaagaatgcggtttattcatttgttcctgtatttgttggatattcttcactcanacactctatat

SEQ ID NO: 1297 - DNA, 434 bp, Cyanidium caldarium
  Clone ID: LIB190-024-Q1-E1-C6
atctgctagacacactagagtttaaccaagttgtgatttttgtcaagtctgtgcaacgagccaatgcgttgaataagcttttggtggaatataactttccgtccattgcaattcatagtagcatgccacagtcggaacgtatctcaagatatcaaatgtttaaagattttcagaagcgtttactagttgctacggatatttttgcacgaggaattgatatcgagagagtaaatatcgtgataaactatgatatgccggatttgaaaggtccagaagctacagcaaagacaggagcggatgcttatcttcatcgagttggtcgtgctggtcgctttggaacgaaaggattggcaatatcatttattagttccaaagacgataatgacgtgttaaacgaagtacagagtcgctttgaagtttccatcgagcccctt

SEQ ID NO: 1298 - DNA, 420 bp, Cyanidium caldarium
  Clone ID: LIB190-024-Q1-E1-C7
ctgacgcgtgggggaagatgggagactcagactattcattttctcttacgacctttagtcctagtggcaagttggttcaaatagaatatgcgttgaacgctgttgctgccggtgctacttctcttgggattcgagcgaaaaatggggtcgtgatcgcgacggagaaacgtatgccgtccattcttatggaaagtcatactttagaaaagatatcttttatttcggaaactacaggaatggtgtattcgggtatgggtcctgattcaagagtattattgagaaaggctcgaaagtttgctcaaagttactatcaaacctataaagagcccataccagtcgttcaacttgtacgagaaacagctttcgttatgcaagaattcacccaatctggtggcgtaaggccttttggtgttagtttgt

SEQ ID NO: 1299 - DNA, 396 bp, Cyanidium caldarium
  Clone ID: LIB190-024-Q1-E1-D10
aaaatgtctcaggaataccagctcacctacttcaatattcgtggtttaggcgaacctgttcgtctactatttgaagacaatggcatcaaatactcggaagagagggtagaagctggcgagcagtggcaaaaactcaagcaagaaggtgtgtcttcaggcaagatcccctttggtcagatgcctgtattgcgcgatgggagcatgtatttagcgcagagtggtgcaatacttcgtcatttagcgagaaaacataacctctatggagacacggaagaagagaaagcgttggcggatatgatcaacgactttgccaacgatcttcgaactccgtacgtgcgcatgatttacagtgatacgtggaaggagatgttacccgagtatttggaaacggcgaag

SEQ ID NO: 1300 - DNA, 413 bp, Cyanidium caldarium
  Clone ID: LIB190-024-Q1-E1-D11
cccacgcgtccgcccacgcgtccggtctcaacgagtactttgcagtcgcatttgtgttttgtatttggatttcttgttccatttgcaagtccaaaaagggtatgacattcaagagcatgagacaaaatgttggcagatgataacaaaacttcagaaggatacttcagaacaggttcgaagcgaagttatcgcaactgttcgatggattaaaaacaagtcgttactagaagggatggttccatgggttgtggaaaccatgaaaactagcacttcgtctaatgaacaatatgcagctgaacagactcttcgaaaattgtatcaaaaaggaacacttttaacgctttctctaggcgaaggagagaactcttggattaccagcaacatggcccgtttgcagttggctgtaggtgaaa

SEQ ID NO: 1301 - DNA, 265 bp, Cyanidium caldarium
  Clone ID: LIB190-024-Q1-E1-D12
ggcaaatacgggaaagcagtaaaagaagaaagagaaaggaaaaaactgagtatcaggaagaaaagagggagtagatgaggaaagaaagatcaaggaagtaagagtaagagaaggagtaatgtgaatgaaagcaggaaagtatttgaagaagagagtgtaaagcgcgtaccttttgcataatgtcccagcgagtgaaagaggaagcaaaaagaaagaaaaagaagtagccaggtaagacccgaagctagttgatcttatgctgtcc

SEQ ID NO: 1302 - DNA, 432 bp, Cyanidium caldarium
  Clone ID: LIB190-024-Q1-E1-D2
ggaagaacaaaaagacaatcctaataagaccgcttccgttgtttctgaacaagacaaccaaagtgaaaaagaacaagatacaacaacaactgttcaagaagagcaacaaaagtacaacaataataacaacaatagtgagaactctacagtccttggtgaagataccaagtcccaactagtgagagcctttgcggatgttaccaaggtttcgtcttctcaagtaatgccaagctctgcaagaaactgttttacaaactattgattggttactaggctgaagaatatcttgaaaacgccaactgggagctacaaacagcagtacgacaatactttgataacaacgagaatgcgactatcggagaaagctctgtccctactgcggatagtattgcagcacacattacagaaataagaaagaaagcaagtgaactt

SEQ ID NO: 1303 - DNA, 222 bp, Cyanidium caldarium
  Clone ID: LIB190-024-Q1-E1-D3
gtgcactacaaatattcccaatccaaaaaataaatacgaaaatactcaagctttatttaaaaaaaaaaaaaaaaaaaaaaaaaaaaaaaaaaaaaaaaaaaaaaaaaaaaaaaaaaaaaaaaaaaaaagggagggaggagggggggaaggaaagagggttaagggggaatggaaggtgcaagggacgttagggtgggcagtaagggggaatcaattggcggg

SEQ ID NO: 1304 - DNA, 319 bp, Cyanidium caldarium
  Clone ID: LIB190-024-Q1-E1-D4
cccacgcgtccgcccacgcgtccgattcttacctgaaaccaagggctttacattggaacaaatgagagtcgtgtttgaggagggtttattcaccatcgcagcttatcactgtcgtgctggttggagaacacttcgtaagcttttgggacttccagttccagacactcctcttgtttctccctatgataaggcctacgctattgaccgcgctaagagagaagaagagatgatgcatgctggcgaagttgccaagtaatgcttgacatgatttatattgagatggtagtttgaaataaacataaatcttgcttgttatgtt

SEQ ID NO: 1305 - DNA, 429 bp, Cyanidium caldarium
  Clone ID: LIB190-024-Q1-E1-D6
ctcaagtggatcatcccacgttggtaaagatagacttgtctcaaggcagctttaaagtactccaagactgtgacagagatttagaatgtgatcataataccaagtttcagttggaacttattcagtatggtctcttttcacctggtttttggacgagagaaaatgttctgctcttctatttggagctcgtgtcaggtgtattcataagggacactctctaccttttctacaacaaaggtgaagaacatttgtttgcgagtttaatgctgttgttggagacacaagtttcactgtatgcagacataaaaacaaactgggagaaacgacactttatcgtttgcctcatcgtcaggtctttgtgtgaggaatatcaacgacagtattcagagctatgttcaccgaatgaaagcacgaaagatatgctactag

SEQ ID NO: 1306 - DNA, 422 bp, Cyanidium caldarium
  Clone ID: LIB190-024-Q1-E1-D9
gggtattggagagagattgcttgttgaaagaggcaagtttgaagtatggaacatgtatcgcggcggacttcacgatgttctttggacttgagtactttagaggagtcacaaaaggagaacctaaatggcaaagagatagactgtattctaacacctgaaaaaagaaccatgccaccttccatatccacgaaagaaatagaaaatgttctcaaccttttcctttcttatgatcaagataaagatggtaaaatcactatcaagcagcttaaggaattattatcgtcgctttttactcaagaaagaattggaaagatttatttcttcaactttctgtagatagtttgtatgatagtggtattatagactggattggtaagcaacttgaagcgcggtcgattcgtcgctaactttggcatttttgt

SEQ ID NO: 1307 - DNA, 418 bp, Cyanidium caldarium
  Clone ID: LIB190-024-Q1-E1-E1
ggaaaaagagagaggcctcgttgtccttgtcttatggaagcgtctcagcgatggactggtcgatatatccaaaagtgccttctcacttatccatcacttggacagttgagtagtaaatggcgccacttttccacagcaccttgggtacaagatactttggaggaatattttacgtttcctagagagagtgaaagaaataactacgcagtgaattggtcgttggcaaagataggagtgcctccaaagggtgaagttttttacaacgtgccttcgaggacgattgttgccaactcgcctggaaagcttagccgtgagaggaggcacttgttggtcccccatcaaaagacgggcaacttccaggaatttgtcctaggaaataacttgaaaccgagagaatatgcaaaagccttgaaagctg

SEQ ID NO: 1308 - DNA, 415 bp, Cyanidium caldarium
  Clone ID: LIB190-024-Q1-E1-E10
accttacctctccaagaaggtgttgcacggctgtcgaaagaacgtgctgtgaagtgagagaacgtacgagaaagccaagtgaggaaaagaaggcaagtagagggcggcccgagaaaggagagggcgtaagacgtgatacagagtaggaagaaaagagaagagagctagaaaggaggtaaaagaagagtaaaaggactagaagaggtacggaattcacgaggaaggagcgtgaaggaaggaggaatcccaagtaatcgaggaagaaaaagcttcggtgaaagcgtgaacggattttgtacacactgcccgtcaagttctggaagtgtgctaggaataagcaggagaagtagaagagagtaggaaaagaagaaaggaagtgaagacgtaagacgtgaaaaaaaagcgtatgactggg

SEQ ID NO: 1309 - DNA, 414 bp, Cyanidium caldarium
  Clone ID: LIB190-024-Q1-E1-E12
attattgaaatgatcttcgcacgtatcacaacctgactatacaatgtacagttcctatttgaaaagttactcacagtttgttttattcgcaactgtgtttgtatgtcttttcgcacgagcttgcaatgggagaacgtcagaaagtctagattggctcggtttaggagatccagagtttgcgagtttcaacgggcgctttccaactttaagtgatttgaagcgtttattcttcgaattaggggaaaatttagcggaaagaatagagttattgggttctgtaactcaacactctagtcgaaagtttctgaatagaccatttctttcttgcgcaaataggaaagcagccaatcttatcaagggctggttagaagaggcaggctgctataacatttctatagatttggttggtaatgt

SEQ ID NO: 1310 - DNA, 426 bp, Cyanidium caldarium
  Clone ID: LIB190-024-Q1-E1-E2
gtcgtgtacgagggttggtcatttgttgagctgaagagtcaatgaacaagcttcagttgctatacgtaaccaaacaagctgtttcaaaagcatggcaaagagaacagaaaaggttatactccgagaagaaatcagttgcagaaggaactttgggaagcaggtggaaggaaagagaaactgcacaagagagcgcgtactttaatcgtgaagatgatgcaggcagtacaaaggttagcagcgaaacttcggcagcatattgagccatcggatgaagtactcgcccaacaaagaaaaggcgtggcagaaatcttacaaaagcacggtgtccagcctaatcaaagtttgattgaagatattgtccgtttctttcattaattcctccgtgtttgatgtttagctgctgttcaacgaaagttttgtttggga

SEQ ID NO: 1311 - DNA, 397 bp, Cyanidium caldarium
  Clone ID: LIB190-024-Q1-E1-E3
cggacgcgtgggcggacgcgtgggcggacgcgtggggggcaatgtacagggaagtatgacccagtaatgaggagtggagtaaacagaaaaggaagtaaaaggagggaatgaagggaagttatggcaaaaacacgtgccagcagcagcggtaaaacgtgtgtagcaagcgtagagcagaagaactgggtgtaaaggtcgagtagtagagtaagtgtaaaagggaaaggaaaggagagaaagaggaaagggatgaaatgcagagatctctagagaaaggcaagaaagaaaagaaaggaagacacagtaaatgaggcgagaaagcataggaagtgaaacggattaggaacccgtgtagtctatgcagtaaaagaaagaatgagtaagaaaaaagggagtc

SEQ ID NO: 1312 - DNA, 226 bp, Cyanidium caldarium
  Clone ID: LIB190-024-Q1-E1-E4
cttcattggaaaaggaccaactgggaaaggaagctcagttgcatcaggatagtgcctaagaagaagcaatgttggttggttgttgatgtgttggtggtggattgtgtacatatatagagagagtgtgtgtgagagaaaatgctttgtgagtgaccactcctcaaaaggcagtgtgaacaaatcctcacaaagcaaaagaggaaaataaaagctctttgttgatttt

SEQ ID NO: 1313 - DNA, 444 bp, Cyanidium caldarium
  unsure at all n locations
  Clone ID: LIB190-024-Q1-E1-E7
cggacgcgtgggcgtcaacaacaacaggaaattcattgatggacaaacctcaagtggatcatcccacgttggtaaagatagacttgtctcaaggcagctttaaagtactccaagactgtgacagagatttagaatgtgatcataataccaagtttcagttggaacttattcagtatggtctcttttcacctggtttttggacgagagaaaatgttctgctcttctatttggagctcgtgtcaggtgtattcataagggacactctctaccttttctacaacaaaggtgaagaacatttgtttgcgagtttaatgctgttgttggagacacaagtttcactgtatgcagacataaaaacaaactgggagaaacgacactttatcgtttgcctcatcgtcaggtccttgtgtgaggaatatcancgacagttatcagagctatgtt

SEQ ID NO: 1314 - DNA, 421 bp, Cyanidium caldarium
  Clone ID: LIB190-024-Q1-E1-E9
cgaatgttttcgtttctcgaaaaggaaaaacgctctattaggccaaagtgaacgactaggatcttctgcaagtgcagtgcaacttgtatggcgcggattgggatgataataatgagcgcgagacacgccacaaatattgtccaagataagcagttacacttgtgacacagtgaaggttcaaggcaaccgaggacagactctagttctcgaggtggaacaggtgcctggttccgtcgaaaaaacataattatcccaaaagtctggaattcaaattggctaggtatcggaaaagccacaggcacttgctatacaaagagtccttccggctgttggcgttaaggccatccatctctcttgtgcaaggacgttcatttggggcgttttggtggcggtgcaccgcatataaaatttcttcaagtcc

SEQ ID NO: 1315 - DNA, 443 bp, Cyanidium caldarium
  Clone ID: LIB190-024-Q1-E1-F1
gcggcgtcataatagaaatccgaaaggagtagaagaaaagagagagaagaaagaaaagaagagaaaagccgtactgaagaccgacacaggtactcgaggagaaaggagacccaaattaaggtgagagaatggacgataaggaactaggcaaaaggatatggtatctgcggtagaacatatgaaagaagcagcaccgactgtttagcaaaaacacagcactctgcagaaaagagaaaatgtaaagtatagagtgtgcggcctgccaaatagtagagaagaaatcgatgaaagtgaaagcgagtaaaagatgaggtatagagaatggcggtcctaactgtaaggatccaaaggtagcgaagtaaatagacgtttgaaaggcgtccagtatgaaaggagaaacgagtgtaacactgtctagtcgtccaactcagcgaaacagcaat

SEQ ID NO: 1316 - DNA, 429 bp, Cyanidium caldarium
  Clone ID: LIB190-024-Q1-E1-F3
cccacgcgtccgaattaaagtagttgttttatatttcgctgatatgcctttgtttctcaaaacatattgaaagcttttgaatgtgttaaagagactgatttttctttatttttgttttcgtgctagaatttgtttatgtttcctgtttgtcgcctttcttctatttctaaaggacaagcctttgaacacgctgtgttgttgtatctttcctacttgggttttttcatacgtagtactggaggagttggtgacggcggtatcgactttcgtggaacttggaaacctaataaagcaatagagcctgtacctgtcgtcggtcagtgtaaagcattatcaggaaaggttggtgttcacgttatcagagagatggaaggaatcttgtgccgcgaagagcctggtaccttgggtgctatagtgagtgagaagggt

SEQ ID NO: 1317 - DNA, 385 bp, Cyanidium caldarium
  Clone ID: LIB190-024-Q1-E1-F4
cggacgcgtgggggccagtttcctcaggagccaatgaagaaactttttgtcaaaatattatcttcgaagctgatagtatggaggaaatttgcaacaattatttcttcgcttctacaagttctttgggcctaggatgcctgaaacattgcctcagaaggtgcgctcacctggattgtctgtcagaagaccaaggggaaagacttacaccagagtacacgtctaacgagtgtactgttcaaaatatttgtttccctgagcttgcaacggagatatctcaagatgaagttttagagaactatctagttgatgattaccccaatagttccaaccataattttgtgatcgaaagttggcgttcattccaaaaagatgatttttcgttgtc

SEQ ID NO: 1318 - DNA, 418 bp, Cyanidium caldarium
  Clone ID: LIB190-024-Q1-E1-F5
cggacgcgtggggtggtggaggaggacgagtcgacgaaagatcggttggatcgctacggctattccgagatattggaaaacctatgggaaatggagagtggagaacactatttgttgttgttccaaaagagatgaacacgaagaagatattcttggaataggaaatagtacccgaatgacgagacctcaaccacctccaccggaaagttgttgtggcaatggttgtcctgactgtgtatggacggtttatttacgacaactggaggaatatgaagaagaacaaaataagagaaaaaaagcacgagatgatagataaaaagatattcacgggtatggctgtccaacgcgcggcatattttccaggatggataaaaaagccaacgaccacagaaaaaaataacacagctattcgtgcgct

SEQ ID NO: 1319 - DNA, 450 bp, Cyanidium caldarium
  Clone ID: LIB190-024-Q1-E1-F8
gggccaaccaagcctccgggttgtatggaaccaattaccggaaaatgttatgaaggcggtaacggcattgtttgaaattggcccggctttggttaaaaggttttgggaaccacgggcggatggtcctgtccaacaaggattggttcccaaggttgccaaccaattggccttggaaatggttaatggggcatgtaaacttgccaaaaatgataacttacactttgcacaactccgcaatcaagtcgaatctcctgcgggaaccacagtttatggtacatcagcgttggaaaatggacaattccgaaaggcattgattaatgccattcaggaggctgttttacgtgcaaaacaactttgattattcttgtggatgatcactgtcattattattattgttgttgttgttgttgttgtcatgatgatcatcagaatgtggatgatggatatgaa

SEQ ID NO: 1320 - DNA, 406 bp, Cyanidium caldarium
  Clone ID: LIB190-024-Q1-E1-G1
aggacagccaatagcagatggattgaagttaatgataaaagagggagtaaagccaacaagagcagagggaatgatgtataaagcagggccagtagtaacatggatgttatcgatgctaggatggagtgtagtaccaataggagaaggaaaggtaatagtggatatagaagtgggaataatagcatggatgagtataggatcattgggagtatatggagtaataataggaggatggggaagcagttcgcagtacagcataatgggaggtttaagaagtggagcgcagatggtatcgtatgaattaggaatgggagtaatgaccctgtagtgacaccttgtggacacttgtattgttggtcttgtatatacaagtggatggttgctcatcctgaatgtccttcctgtc

SEQ ID NO: 1321 - DNA, 419 bp, Cyanidium caldarium
  Clone ID: LIB190-024-Q1-E1-G11
cccacgcgtccggagcgctaccggtgcttttccatcctccgaccacagcaaccactcctctagttcgcgtcaacgactattacaacaaatggaataccaaaaatggatggaagataaagaaaacgaagcacgtcaagaaatcatcgacacgcatcataaagtgatggatggcagtctcaagtccaagatttcttcttgttcacaggacaacaacgatggcaagaacatgaggaagaaagaggcaaatacgggaaagcagtaaaagaagaaagagaaaggaaaaaactgagtatcaggaagaaaagagggagtagatgaggaaagaaagatcaaggaagtaagagtaagagaaggagtaatgtgaatgaaagcaggaaagtatttgaagaagagagtgtacagcgcgtaccttttgcata

SEQ ID NO: 1322 - DNA, 447 bp, Cyanidium caldarium
  Clone ID: LIB190-024-Q1-E1-G12
cagtacggtcaggattccgggtcaccagcgtccacccagcgtcgaatacgagagcaaaactgtcaaactggtaattatggataaggaattttttgaagtagacacaagcatggtacccctttcggaaccattaaaaaccgtctgggaaaatacggaggatacagaaagaataccctgtgcaaaggtaaaaggacaaattcttgcaagggttatcgaatattgtagatctcacacactcttaaagaccattccacactctgaggatgatattgagcgctgagatagggaattcctaagtgtatatcaaccacccctttaacatttgattctggctgcaaactatttggatatcaacatcttgttggatataacttgtaaacgagtagcagatatgatcagaggcaagacgccggaagaaataagaaaagagtttaatattgtaaatga

SEQ ID NO: 1323 - DNA, 436 bp, Cyanidium caldarium
  unsure at all n locations
  Clone ID: LIB190-024-Q1-E1-G2
ctaggcaaaaggatatggtatctgcggtagaacatatgaaagaagcagcaccgactgtttagcaaaaacacagcactctgcagaaaagagaaaatgtaaagtatagagtgtgcggcctgccaaatagtagagaagaaatcgatgaaagtgaaagcgagtaaaagatgaggtatagagaatggcggtcctaactgtaaggatccaaaggtagcgaagtaaatagacgtttgaaaggcgtccagtatgaaaggagaaacgagtgtagcactgtctagtcgtccaactcagcgaaacagcaataactgtgaaaatgcagtaaactagcagtaggacggaaagacccaataattcttgactagataggtttagggaggagagagaatcatgaagtanaggaggtggggtaagagatgaaagaccactgcatgaggataag

SEQ ID NO: 1324 - DNA, 421 bp, Cyanidium caldarium
  Clone ID: LIB190-024-Q1-E1-G3
gtggttttgaaatgtggtctttccactctcctgcaagagtttcaacccgtcataaaagccaggagacttgttttctttccaaggaccctatggatagtgagctggaatctgttacgtttctaggaaatattaaaagacagacacgccgtgtactgagaaaaggcgctgcttctttgtttccctatttgcagtcgtctgttccaaagcttcctacgaaatatggggctttggttgcctgtgcagtcaagtctctcatagctgccttgtattatatttcagtatccgttagccttacggtgtttaacaagtctatttttcaaaactatgactttcaagaaactactgttctggtctgtagtcaactttccctcactattcttattttgtttgggcttcaaagaacagagcgaatttcgacgag

SEQ ID NO: 1325 - DNA, 435 bp, Cyanidium caldarium
  Clone ID: LIB190-024-Q1-E1-G4
cccacgcgtccgcccacgcgtccgtgatgacctttctttcaggtattttaagagttgcatggatgtcacatccttatcgtggagactcggcccctaagcgcatcgtgattcaacatctggtgacttgtaaaaattcgagcgatattttcataggttccgtagatattcgtgatttgaagagtgaagagagtttgattgcttcattatcttttccatcaggtacagcggaagatgtttctttggcgtctcactttcgctggggactattgaatagtggaccttgggagaatctccaacccatttcttggttcttttcaggctatcgaataggtcattctgtgtcatctcatgacttgccttgtcctcggttggagattatccgcaaagtggtgcatgaaagggatggaacgaagatgatagaaatgttggcttcgt

SEQ ID NO: 1326 - DNA, 432 bp, Cyanidium caldarium
  Clone ID: LIB190-024-Q1-E1-G5
cccacgcgtccgcccacgcgtccggtcaaaatgagatttccacgaaccgatggatagctgttttaagcgactccacaattatgattgacctcacaaccaacatgaacggtaacaacaacgatactgatgtcgcacttggtgaatcaagcttccctcgaggttctgtcgaatatattatcgagagggacatcgagagaaagctttttaagtgggcgaatatgaatgcgacacacagtgccccaaaaaacttcccttttcctgacccaacttctcttggacttgcaggattcagtgctaccacgtttattttgagtgtattcaacgcaaatttattgccttcttccatatcaagtggcgtcattggtgcaggatttttctatggtggagccactcagttgattgctggtctgttgtgttttgttactagaaata

SEQ ID NO: 1327 - DNA, 441 bp, Cyanidium caldarium
  Clone ID: LIB190-024-Q1-E1-G6
ggcccacgcgtccgcccacgcgtccgcccacgcgtccgcgcgtttggatgtcatggtgatgcccaatttatatggcgatatactcagtgatttgtgtgctggtctcataggtggattaggactaactccatcaggaaatatgggacaaggttgtatgttggcagaagcagttcacggcacagcaccggatattgctggaaagaatatggccaatccaacggctctcttattgagtgcccttatgatggttcgtgaaatgaagctgtttgaaaaagcagatatagtagaaactgcagtgtatgatgtattgagagaaggaaaggttcgtaccagagacttgggaggaacggcaacttgtacagaataaactttggccattatcgataaaattcagcagcgcatttctttccctaataaaatatgagtcaagacgacgaacac

SEQ ID NO: 1328 - DNA, 435 bp, Cyanidium caldarium
  Clone ID: LIB190-024-Q1-E1-G7
gtcatttataccgaaaatcgagtggcacgcaacgcattgcggtttttaccgtacttttgtggtgtttcaggggatacgcaatttgctttgactcagttgttgtcggattccgagtttgtgcagaattttattcgtgaaaatacccagcgcctgtatgaaacgtatagcgttcattgtagttgtttggacaaattgggtatttcctatgttcctagtgaagcaggtttctttatttggatgaatttgaacccatggatggcatctcatacttgggaaagcgaacgagagctttggcgtcggttgttggataaagccaaagtcgtccttacaccaggtgaagtttgtcatagtacagagcctggatggtttcgttgttgtttttccgcagcgtcctcggaagctgccaaagtggcttggaaacgagtggaacaatgc

SEQ ID NO: 1329 - DNA, 359 bp, Cyanidium caldarium
  unsure at all n locations
  Clone ID: LIB190-024-Q1-E1-G8
aagcaagcctccgttaagaaagaagggaaagggaaaaaaaaaaaggttaggtttaaaaccacaaacccaaaagggaaagcttaaacccataaagaaaagaaatccaaaaagaaggagaaaagggtaagaaagaggaccgattcagggtaaaaggtanaggagcaagangagaagagagaatgctgggtggattaccgaaacaagagaagggaattaaaaggtaagaaagaggaaaggtttacaagagaaggaagtacaaagaagagagtgtaaggcggcgtcataatagaaatccgaaaggagtanaagaaaagagagagaagaaagaaaagaagagaaaagccgtactgaagaccgac

SEQ ID NO: 1330 - DNA, 424 bp, Cyanidium caldarium
  Clone ID: LIB190-024-Q1-E1-G9
cccacgcgtccgcccacgcgtccgttaaatactaacttggttgcttagtaaatttgcatgttatgaagaagctattcaaaaccccaggaaggatgttcttttcttaaccaagacttttcaaagtgagtttcaccgaaaggccatatggcttcgagaagacttttgtggcactgcagctatatctcgtgaatttatccgatcagactttgaaagatttgctgttggagtagatatagattctgtagctatagactggtgtctcaaacaaggtttattgagtcttccgtctggtagtgatagacttgagctagtagtagcagactgtagagagtatgaggataaaagatcgtatgacgttatttctgccaacaactatagcttattctttctcacaacccgagtggatctcttgagatatttgaag

SEQ ID NO: 1331 - DNA, 424 bp, Cyanidium caldarium
  Clone ID: LIB190-024-Q1-E1-H11
gacaaggtcacaggcgaatccctttgttatggctttattgagtttcccgatcgcaaatgttgtgaacaagcgttttttaaaatgaacaattgtttgatcgatgaccgaagaataagagttgacttttcacaaagcgtggccaagttatggaaccgagttcgtcgaggctatcatgatcgttttgatgagaaggaatctgttcagagtcgtggaaaacgaacttataacgaatatgtatttgatgatttggaaaggaaagctttatctcaagaaaaacgttccccaaagcacaaaaaaaagtgaaatgagtgttttccttgacacaacaatatttattgcatatttaaaattccagtttcttcggtatttcccaagtaaacgtcggttccactttgggatctcttccgaaatgtccgtacgctgc

SEQ ID NO: 1332 - DNA, 99 bp, Cyanidium caldarium
  Clone ID: LIB190-024-Q1-E1-H12
gtccaaaaaaaaacaaaaaagtaaaacaaaacgaataaatataaaagaataaaaaaaatggaaaaacataaaatcacagaaataatgtcagaaatggtt

SEQ ID NO: 1333 - DNA, 333 bp, Cyanidium caldarium
  Clone ID: LIB190-024-Q1-E1-H6
agcaaagatttgctttccaaagaaaattcctcggaatattgaaatcatgatacaaagtatacgaactctgactgaaaaagtagacaaacatagtatgccgagtaacacaggagaatggtggatagccaaagagctttgaaaacccaggtgtttgcacttgtagcaaactgcttaattctaatgagagtccttttcaagagataaggatgatgaattttgcactgtggctttaaacgaacacttacctctatcttcttcgcttttatcctgcagataagcaaagggttttgcgagagaaattctccttttctttgagacatgcggtaaatctgc

SEQ ID NO: 1334 - DNA, 375 bp, Cyanidium caldarium
  Clone ID: LIB190-024-Q1-E1-H7
gcgtccgaccacgcgtccgcccacgcgtcggttgaaattgtaaacggcgcccaaaacaaaaatggtttaacggcaacaaaatttccccccaagaaaatgtcaattagcatttttgaaccctgaacctgcgaatcaggccttgcctcgagtcgtcgaagttcttggagatatccacaattggagtggcagccgacgagaagaagagttggaacagggaagaagattccttgcatcattccttggaggaagaacagaacctaaagtgaaacaggtcacatagcccagttgtacttttctagtctttattcctagatacccattttcttagtgcatacaaactatcaggtgtaaactgtttctgtttgctatcaaaaa

SEQ ID NO: 1335 - DNA, 222 bp, Cyanidium caldarium
  Clone ID: LIB190-025-Q1-E1-D10
gtttgtcatctctaaattgtgtatgaggtatgttctcaacgcaatggtacggcaaagacgctatgtgcactttgtgaacgtgccaactactatgcaaaacatggttctgggagagttatttgtcctgcttgtaatagatggcaagtatgtgccttgtcacctttgttatgcgactggaaatgccattgatttgaaatacggtttttgggaataatgcttgga

SEQ ID NO: 1336 - DNA, 172 bp, Cyanidium caldarium
  Clone ID: LIB190-025-Q1-E1-H12
tccgaatcaacttcaacacaaacgcattgtcgtttggcaccttccttctcatgtgagtatggcaacgattgaacagatcttctcaaggaggggggaaacactctttggccacaagtgaggggtgtgcgaccaatggactgtggtgcgacactgatgggcactgttctgttcg

SEQ ID NO: 1337 - DNA, 460 bp, Cyanidium caldarium
  Clone ID: LIB190-026-Q1-E1-A1
cacgcgtccgccagcgcgtccgcccacgcgtccgacaaccatcacatgcgcggaaacaaagcgccagaagagcacctccacaatcagctgaaccaagatgttcttttaagagttgtgagatttgctttgctttttccaccagaggagacaaggagaaatgctagctgaagagctttttttggctgcttcgacttttacctaactcggcgatgcagtggagtctcaggtatacccaacaaggacgttgcttcacaaggacggcgtcgagagagactcatcgtcaaagatagcagcaactgaaagtctattgtgacgcttcagctgtaaaaaagtgctattgacttgcgaagtttgctggctacttggactatcttgccgttgttccagagacggcacaagactacctttgaaaatacgattattttgagcaaggtgcgactctagaaccttttgtaacaat

SEQ ID NO: 1338 - DNA, 430 bp, Cyanidium caldarium
  Clone ID: LIB190-026-Q1-E1-A12
cacgcgtccgccaacgcgtccgcaacccgaatgtggcaagttggcaagcaagtcagaaaaacaagagaggaatccagtattcccatcgttcctttttctgcaggtgtatacattgcagctatgatggctcagattgacattttgatggaaaagggacatccggtttcggaaattgtcaacgaatccgtcatagaatctgtagactctctcaatccatatatgcatgccagaggtgtttcttatatggtggataattgttctactactgcaagacttggtgcgagaaagtgggcacctcgctttgactataacatttctcagcaagcatttcctgttcttgacaatcaagaaccgttggacatgcgcaagttggatgaattcttaagtcatcctattcattcggcggtattggagtgcgcaaagttacgtc

SEQ ID NO: 1339 - DNA, 419 bp, Cyanidium caldarium
  unsure at all n locations
  Clone ID: LIB190-026-Q1-E1-A3
gtcaggaatcagcagtctgacgatgttattaagagattatgctccttcttgtgttcagcaacaagagttgaaaaactattttggtanaaagattgcagtggatgcttccatgaacatatatcagtttctttctgccgtaagggctggagcagataatttaagaaacgaagcaggtgaagtgaccagtcacttgagcgggcttttctatcgaacgacccgtttgatggaattgggagttttaccttggtaagtatttgatgggaaaccaccacaactaaagagtggagaattgagtaagcgtatcgaggcaagaagacaggcagaagcaagtgcagcattggcgaaagaggaaggagacgttgaatcatatgagaaattcaacagacgagtgaataaagtgtcgcccgaggttatcgagc

SEQ ID NO: 1340 - DNA, 255 bp, Cyanidium caldarium
  Clone ID: LIB190-026-Q1-E1-A4
cttactacgttaggaggagattatgctccttcttgtgttcagcaacaagagttgaaaaactattttggtacaaagattgcagtggatgcttccatgaacatatagcagtttctttctgccgtaagggctggagcaggtaatttaagacactaagcaggtgaagtgaccagtcacttgagcgggcttttctatcgaacgacccgtttgctggaattgggagttttaccttgttatgtctttgatgggaaaccacca

SEQ ID NO: 1341 - DNA, 424 bp, Cyanidium caldarium
  Clone ID: LIB190-026-Q1-E1-A5
gtcgatcaagaagagagatggcgtcttcctcaactgcctatttttcaagcaatggaggtgcagaaggaggccttgagagtacaggaagcaatattgtttatgtggtagtagctgcaggtacgaatatacttgcccagtacgccgccgaaaaggggaattatgaagctattgcgtcacgtatattagccaaagttccacaacacgacgtgaagagcttttatgaaaacgataaccttagtttcaactttatggtatctaatggaataacctatttatgtatcgcaagacgactttaccctcgacgactcatatttgggtttctagatgatatcaaaaagcgctttgtttcgcaatatggtgaaagcgcaaagacagcaggtccccttcatatgcagcacgagtttcgtcctattttaaagcagca

SEQ ID NO: 1342 - DNA, 308 bp, Cyanidium caldarium
  Clone ID: LIB190-026-Q1-E1-A6
ttttgattgtttatcgtttgtcaaagtttggttgttttcttggtagcagttgtacattcaacatcatcaaatgccaaagggaggaaagaaagattcttcaaagaaagaagccacaagtaaacctgcagcagcagatgctacaaagacgacagaaaagtctggtccggaagccaagttgaagggaactggtgcaaagaaacaataaaaagttgactatgcatgtgcagtcctgttatgttttgtgagttctgtttgatagtttccagctattcttttggtagtgaataaagagaaaattttttatattt

SEQ ID NO: 1343 - DNA, 432 bp, Cyanidium caldarium
  unsure at all n locations
  Clone ID: LIB190-026-Q1-E1-A8
acgcaaccgcagggatcattccaagttggtaaagatagacttgtctcaaggcagctttaaagtactccaagactgtgacaaagatttagaatgtgatcataataccaagtttcagttggaacttattcagtatggtctcttttcacctggtttttggacgagagaaaatgttctgctcttctatttggagctcgtgtcaggtgtattcataagggacactctctaccttttctacaacaaaggtgaagaacatttgtttgcgagtttaatgctgttgttggagacacaagtctcactgtatgcagacataaaaacaaactgggagaaacgacactttatcgttggcctcatcgtcaggtctttgtgtgaggaatatcaacgacagtattcagagctatgttcaccgaatgaaagcacganagatatgctact

SEQ ID NO: 1344 - DNA, 419 bp, Cyanidium caldarium
  Clone ID: LIB190-026-Q1-E1-B1
attcctacccaagtgtttccttggtattgctatcggtgggcaacctgcaggaaggattgtattcgagttgttctccgatgtcgttcctaaaaccgcgggaaatttccggtgcctgtgtacggtgaaaagggtttgggacaaagacccaagtttataggataattcccagttcatgtgccaaggtggagacttttcacccggcaatggaacccgtggcaagagtatttacggcaccaagtttgaggatgaaaacttcaagttgaagcattccgagccctttttattgtccaaggccaatgctggaccgaataccaacgggagtcagtttttcattactgtagttaaaacaccttggttggatgggaagcatgtggtgtttgggaaggtttgttaaggtacggataatcttaaagctatgg

SEQ ID NO: 1345 - DNA, 434 bp, Cyanidium caldarium
  Clone ID: LIB190-026-Q1-E1-B11
aatactctataatgacgtcgtactatcgtttgttttgtcttttcaaagctagaagactatttatttcctgctatgttttagaggctccaaagattttttgtgctcatcttattccatgcttcgtggtgggtgaatggctcctttgacaacagggttgtcacgaccccgccaatctccacaacttcaactgccaacttgtgcgcgtatatgtagatatatttgtacagattcgtggtgtagaaagaagagtgcaaatggttgaaaagtaacagcagagggttagtatacctttagagaaagcacttgaaaaagtgttcacgtacttttacatatctacctgtaataactgtttttgcttgtagagattacaagtttactgtacttgacaaggtttccaagtttcattcattgcctttaagtatgtatgattgtac

SEQ ID NO: 1346 - DNA, 428 bp, Cyanidium caldarium
  Clone ID: LIB190-026-Q1-E1-B2
gtccgagcgattatttacacagactcagagcggaccacaaccagatgcaccaaccaatgatacttctgaaactatatatatttcgtcactagcgttgttaaagatgctcaagcacggcagagcaggagtgcctatggaagttatgggactcatgttgggagactttgtggacgactatactgtaaaggtggtagatgtgtttgccatgcctcaaagtggaacaggggtcagtgtggaagcagtagacccagttttccaaacaaaaatgttggatatgttgaaacaaactggtcgacctgaaatggtggttggctggtaccactctcatcccggttttggttgttggctttcaggagtagatattaatacacaacagagttttgaagcactgaatagtcgtgcagttgctgttgttgtggaccccattc

SEQ ID NO: 1347 - DNA, 276 bp, Cyanidium caldarium
  Clone ID: LIB190-026-Q1-E1-B4
tctatagtgttacatattacgaacacagcttttggtgaagtgtgtgaaactttttgttagcaaattcaaataatcacctctttggtttgcaagtggttgtgttagcggtacttgtttgtttgaaaagaacaactgctttgtttcttgttgaaacaagtttcttgtgaaaaaaaaaaaaaaaaaaaaaggaaaaaaaaagaaaaaaaaacgaaaggataacaaaaggatttacacataaatacaacgtaaaagcaacataaaaactgtcacaaaaat

SEQ ID NO: 1348 - DNA, 452 bp, Cyanidium caldarium
  Clone ID: LIB190-026-Q1-E1-B6
ccacgcaaccgcaaacgcgtccggatttttcttgtggagtactggggttggttggaagctatctttgagtgatcattatgagcaagaagataggtaagggaggaatagagagtgcacatatctaggtaaaggatactgtctacagtcatggaacaagctagaattagtaacagtggaaagccagaagagtagcaacagcagtcattctatgtcttttcctaaaggcacctctgcaatcttgttttccctagggcaacttggcagttggagacaaggcgagaatcttctgcagagatagcagtgcaacttgtatagcaagagtgacttgtgcgccaataataatactgagcgcgcgtgacactactgtcattgtgagtcattcagttgcaaaaaccacgtgacaaggtgattctttgaaacgaataaaaggttcaagttacctgttctttaca

SEQ ID NO: 1349 - DNA, 448 bp, Cyanidium caldarium
  Clone ID: LIB190-026-Q1-E1-B8
ccacgcatccgcaaacgaatatacctacaacgctctcataaagggttatgcgagagcaggcaacgtgcaaagtgcagtccaaatttccaatcagatgcacagcgaaggaatcgtccctcgtgctataacttatagcgtgttgatcgattctctaggaaaatgtaagatgttggatgaggcgtttgctttcttcgaggaaatgcaagtcaaaggtatttcacccaatgggatcacttttaatgttttgttatcggcttgtgctgcttgcaacgattatacgagagcattgatgatcgtagagtggatggaacaacgaggaatggactttgaccgatacacatttaatgctttgatacaatctgcagtgaacagttaaaattatgaagaggctttgagatggtatgaaaagatgattcattccctcgtcgtttcaagtaatgtgactttt

SEQ ID NO: 1350 - DNA, 313 bp, Cyanidium caldarium
  Clone ID: LIB190-026-Q1-E1-B9
aatcctctagagtgaatcatatcatcgggactattgcacctatgacagaagtatggtctacgaaaattcttgaatatcagcaactggttgctatctactgataaggggatacttgaacatgttctcttgcatcacttctggccccctgaggtacctggagaagcttctacagacatagaatctgcttggttttctgaatatatagtacaaagtaaatttcgcgaccttctacagctcaaaaaaaaaaaaaaaaaaaaaacaaaaaaacaaaaaaaaaaaaaaactaaaacaaaacaaactgtataataacttt

SEQ ID NO: 1351 - DNA, 442 bp, Cyanidium caldarium
  Clone ID: LIB190-026-Q1-E1-C1
gtccgcaaacgcgaccgcccacgcgtccggggacccttgtcctgaagaaacgcaatggctcattgaagagcgtcaaaaaggggagagaaccaatttcttttcctagacaaccacaaaaaggttttggtcagaactgtatatttgaaagtaaaatattacgattgtaaactacaagggaaagatgacattcagagtaatgctagaatgagtgagaagatatgtatcagcatggagaatctctttgtggcaatagtgctcatcatatatatatatatatatatatatatatatatatatacagagagagagaaagtatagaaatcattctacataccgtgttttcatatttttacatgctcttgatcttttctacatattcttccgcaatattttgaagttgtcgattttttgacaccgcgggcaacaagacttgcaacataaa

SEQ ID NO: 1352 - DNA, 57 bp, Cyanidium caldarium
  Clone ID: LIB190-026-Q1-E1-C10
caattctctatactgacgtcagtattataaaaaccaaccaacccttgcttggatgtt

SEQ ID NO: 1353 - DNA, 239 bp, Cyanidium caldarium
  Clone ID: LIB190-026-Q1-E1-C11
acgcgtccggacgggtgtaacaaatattgtatggataaacgggattatatgggatgctgtagtttggtaacaatacctgaagagtggccgttgttggagtggaacgcggaaaatattccccgactgagtagttgagactggcagcaaaggaacgtgtagtacttgggtagaacacaaggtttcggttaagcaacttttgttctagttgaaatacaaatgtatgtatccacaactcatta

SEQ ID NO: 1354 - DNA, 422 bp, Cyanidium caldarium
  Clone ID: LIB190-026-Q1-E1-C12
cacgcgtccgaaaaaacgtgggcggacgcgtgggtggtaagctgctgagcgtcaagtagtagaattgctgtttattcatggacgtaaaggttcctttgctttttcttcctagtgatttgttttttgacgcgatggctccatgtctaggagccataggaggactttatgaacatagtggttacaattttttcccctttttcgaagctctgtcaactgtacgtgtgaataggattgaacgttttgttgtttttgttgcctacatatgtatcaggttgcacatactatgcaatcatgtgcgttataattgtagctatagtgatggcgtacgtccaacgaatttaatggataatgcattgcaaacgacctattacaattatggctacaagtaatttgaataatttcatttgacagatacataattg

SEQ ID NO: 1355 - DNA, 446 bp, Cyanidium caldarium
  Clone ID: LIB190-026-Q1-E1-C2
ccgtccgcaagcacaaatagctgtagaaagtatgttgggaagaacaaaccacactttccgtggtgttcaaggtacctttgtttgtggtgcatttggcatggttgttgctgctactggcgcatcggagaagaagttacagaaaagaggctggaaacaaggacgtgaatatgaagccgcagttatccacgctggatcacatgctggttattaccccaattcaaaaacggtacatctaaagttgctctttgacttgaagactggaaagattttgggagcacaagctgttggtgaagatggtgtggacaagcgcattgattgtattgctatggcattacaagctggtatgactgtgctggacttggaggaagcagagctttgttatgctcctcaatttggttcggcaaaggaccctgtcaatcttgccggtatggtccctgcaaaatatt

SEQ ID NO: 1356 - DNA, 281 bp, Cyanidium caldarium
  Clone ID: LIB190-026-Q1-E1-C4
tccgagaggggagacaagaccgatagatgatgatgatgcgccgagtagagacgtgacttggttggttcagatcgtttggaacaatagaatcttgtagaatttttggcttttttggtggtttatgtgctgttttgtgactaaagtgtctgtactgaatatctgctgttgacatgaagtttgggaaaaagttacaagacgcattggaacctgcaaacatcgattggaagccgtactttatacactacaagggtttaacaaggttaattgctacgagtgtggtg

SEQ ID NO: 1357 - DNA, 430 bp, Cyanidium caldarium
  Clone ID: LIB190-026-Q1-E1-C5
tgccaacgcgtccgcggacgcgtgggtttggtgtgggaattccttcctgtcctatatttacacagtttcagcaggtacaaccagagaagtttgtagcttcatttccagcaaagttacttggttctccttttttcttcttccttttaccaggagcttcacttcctgcaaatactgtcgcatcgttgtactatagtcttccgccttatgaaaactggtcttttattggtctggtaggaaacgattgtcccagtaaactgtgcactgtaaagttaccagctcagtcggcatcagaagaagttatggttgagttgggtatttccattgaaagtatgtcagaagcggctttggctgttccaaccagtccaaccatagttttagatcagtcagattctcagcttcttgttcgaggtatcgctactgacttttttcg

SEQ ID NO: 1358 - DNA, 439 bp, Cyanidium caldarium
  Clone ID: LIB190-026-Q1-E1-C8
acacgcaaccgtagtccgtcatagaaaaaagtgtgcacaacatcaactttcatagcagcaatgtcacctgtttagcgttgaaagataaaggtccactcgtggcaacttgttcggaagacaagtccgtagcgttgtgggaccttcgagtcacggccccgctgcagagcttgaagtgctctcaccccctgagttgtgtatcttatggaagagatgactcagaaatcataacatcagactatagtggttcggcaaggatatggaatattgaaacaaatcgacaaattggtcgtttacagactcgcgactcttctattctcacaggttttcttcacgatacagcccgctcactatttattatgtttggaagctctggatacgtaaacatcagtccactaaactccaaacggggaacaggagagcgttaacttcgacttaaata

SEQ ID NO: 1359 - DNA, 394 bp, Cyanidium caldarium
  unsure at all n locations
  Clone ID: LIB190-026-Q1-E1-D1
gtccgcaaacgcaaccggtcgtttgaatctcgatgtggtcgacgactttgaaagtcttgataatggaggtgatagtttttgtgccctgatgcagttggagacattctgggtattttcctgaggcgatatttctttcctcgtttgcttgaagaactacaacatttcaaggcaagatagatttgtggaatagtgaagtgttgggcaagaaaaggaagtattagtcttcccgaaatggacctcaactgcctaagacatatgattacttgccctgcattgtaatgctttacatcgaggttgctganaagaaatatacacttactttcacaattgctcatanagggtttcaacatgagcagtttcttgtggtctgtccagttgagtactgtatggcatg

SEQ ID NO: 1360 - DNA, 294 bp, Cyanidium caldarium
  unsure at all n locations
  Clone ID: LIB190-026-Q1-E1-D12
cacgcgtccggattgttgtttgtcatctccaaactgtgtangaggtatgttctcaatgcaatggcacgggaaagacgctatgtgcactttgtgaaggtgccaactactatgcaaaagatggttctggcagagttatttgtcctgcttgtaatgatgccaaatatgtgccctgtcacttttgttatgcgactggaaaggccattgagttgaaagacggttggtgggaagaaggcttggagcagcaagtaaggaaaaaataactgggatagaaaataaaacttggcattttcaacg

SEQ ID NO: 1361 - DNA, 433 bp, Cyanidium caldarium
  unsure at all n locations
  Clone ID: LIB190-026-Q1-E1-D2
tggtagaagaagtacaaagcaagcagtgcatcaagtatgtatctcttcagaagatcaagtacgagtcatgctctgcccaatatgaagttcaaaagatcaaacagcaacaatgtactatgacagtctctgaacaatacatacagccggatacttgctacaagtatgttcctgaacaacaattggtgcctcagacttgttacaagtattattctgtacccaagtttattgaaaagtgctatcctcagtatgcaacaacggagaaatgtgtanagtatgagtatgttccatatgccacttctacaccttatccatcggtatctccaagttatactccttcagcatatcaaacaacttctgcttattaaagagccgaagactggatagatttttgaagtgtctcgtgttcaaagaaaacatgagacatgaagaaaac

SEQ ID NO: 1362 - DNA, 460 bp, Cyanidium caldarium
  Clone ID: LIB190-026-Q1-E1-D4
cgtccgcaaacgcaaccgactcgtcattggaatagagacagatgaaaccattatctgtatttacttttcgatattcgacactcgtttctaactttcgtccaaataaagagtcaagtgcgaacgctcaagttatgaaacagctcatcggaaacctgagagaaaaagtggaagaaatagccaaaggaggtggagaaaaggctataaggagacacgaagaaagaggaaagttgtttgtacgcgatcgcattcaaaaactgttggatcctacttctccctttttggaactttctccattggcagcttatcaagtatatgatagtccagttcctgctgctggattggtaactggaattggtctggtacatggcaagaaagtaatggttatagccaacgatgcaactaacaaaggtggaactttttttccgttaacggtgaagaaatatttgagagcacaaagtat

SEQ ID NO: 1363 - DNA, 455 bp, Cyanidium caldarium
  Clone ID: LIB190-026-Q1-E1-D5
acacgcatccgtagtcacgctccgaattgtgcgtgttggttggtggtagtagagacgcattcgatgacttgtggttttgtttgtggagctctacattcttggagttttgcagtgcacaatagacaaagaaaagtttccgtatgtaaaagtcaaactacgacgttcctatctggatcaaagcaggtccacctgcgagcgaatattttccagaagacaagtactccaaaaggggaaagaggaagcttggtgatgattatttccaacggatcaaggttccctgaggatgttacttttacaaccttgcaagatggtcaagtaaaggaaatgaaagcttcagaaattttcaacgggaagaaagtagttatatttggtgttccaggagcctttactccttcttgttccgacaagcatctcccggggtttgcagaaaatctcgagaagttcacggaaaacgg

SEQ ID NO: 1364 - DNA, 454 bp, Cyanidium caldarium
  Clone ID: LIB190-026-Q1-E1-D7
acaagcatctacaaacacgttctggaaaaacgatgcctgggattattgaagcgatatgtggaggacttgccattggcttttccgtcgcggcaaatgctgttttgctcggaagagtaactggtattagtggcatcgttggtggtatccttgcgaaacagtcaggttttggatggagactatcttttcttggaggacttgcaggaggtggttgggtattaaggaagtttttgccgagtacggttcctatcgtatctggacttgtgtctcccctcagattggctcttgctggtgctttggttggctttggcactcgattaggaagtgggtgcactagtggccatggtgtatgtggactaggacggatgtcaaagaggtctctcgtgaatgtgctagtgtttatgaccagtggggcgctaacagcaattcttacgaaaagtgttagtgcatatggagc

SEQ ID NO: 1365 - DNA, 355 bp, Cyanidium caldarium
  Clone ID: LIB190-026-Q1-E1-E1
tccgcaaacgcaaccgcggacgcgtgggtgcgtttgtgggtcgtgttgtgaagctcaaacaactattgcctagatgggtcacgcaaatatttggtatagtcatcctcgaaattatggaaaaggaagtcgtcagtgtcgagtctgttttgcgagatctggtcttataagaaaatacggtttaaacatttgtagaagatgtttccgcgaacaagccaaatacattggattcgaaaagtttcagtgagaagagcgaacaagaatgcaaaagcttcttttctgtaagaaatgtctcgttagtattcctcttctgagaacgttgggcagacaataaaaatattttcaacttttgttttac

SEQ ID NO: 1366 - DNA, 312 bp, Cyanidium caldarium
  Clone ID: LIB190-026-Q1-E1-E10
ggggggtgtttttttttttgttttttgttgtggtttgtttttttttctttttttttttttttttgtttgttgtgtttcttttttctttttttcttttttttttttttggttttttttcttttttttttgtttttgtttttttttttttttgtgtttttgttttttttttctttgttgttttttttttttttttcttttgttttttttgtttctctttttgtttttttgtgtttttctttgtttttgttttttctttgtttttgtttctttttttttttgtttctttttttttttcttctgtgtctttttttt

SEQ ID NO: 1367 - DNA, 190 bp, Cyanidium caldarium
  Clone ID: LIB190-026-Q1-E1-E2
taaaaaataaaaaaaaaaaaaaaaaaaaaaaaaaaggaaaaaaaaaaaaaaagattaaaaggataaaaaaaaaaaattggaaaaaataaaaaaaaaaaatatgggggagggggattagaagtgtggagtactgttttgggaggtggggtattgtaaaaaagtggggtttattcaattggagaggatgttt

SEQ ID NO: 1368 - DNA, 317 bp, Cyanidium caldarium
  Clone ID: LIB190-026-Q1-E1-E4
ctctagaatgagacgcatcaagaaacaacggagagttatgaaacgttgataaaagtattgaaaaagcgtattgaacatatgggaagcagttttacaatggatgaactggtgaatggcaaaaacaccaaaacagtattaaaagagaaacttaaggtgcaaacagatctgacggaaaatagtcagaaaaataagtcttcaagctcaagagcttcttgggaagagtctttgcggagtgcgaatagaagagacaactggaatgttcgacttcgtagtttggaaacgcagctttatgcactttttgtatttgttttgttaat

SEQ ID NO: 1369 - DNA, 451 bp, Cyanidium caldarium
  Clone ID: LIB190-026-Q1-E1-E5
acacgcatctgcagacacttctggcaagcgtgaaccgtgagggtagttcatcatggttgagacaaaacttcaagatggtgttagtgcttctctttggactgttcgtctcttcctctacacagttattttagcattctctgccactatcattggcttggatggacgtaaagcagacaacatatggaacgacagcttattctatgatgggaagtacattaacttttgtgcttattctgcctcttctgttgtagaaggaggggaccatggagcgtgtaaatatgtcatggcgttggcgtctataagtttgattctagtctttttcttgtggctttttacatttgtagatgcgttgtatcctattcttaccaagttttggtttattgaattgggtatcaacgtgtttcaaacaatgtggtggttggttggagcaattgttgtatctgcaaaaagg

SEQ ID NO: 1370 - DNA, 464 bp, Cyanidium caldarium
  Clone ID: LIB190-026-Q1-E1-E6
ccacgcatccggagattgcaaataggccaaagtgtgttgttgtcgtgtacgagggttggtcatttgttgagctgaagagtcaatgaacaagcttcagttgctatacgtaaccaaacaagctgtttcaaaagcatggcaaagagaacagaaaaggttatactccgagaagaaatcagttgcagaaggaactttgggaagcaggtggaaggaaagagaaactgcacaagagagcgcgtactttaatcgtgaagatgagcaggcagtacaaaggttagcagcgaaacttcggcagcaaattgagccatcggaggaagtactcgcccaacaaagaaaaggcgtggcagaaatcttacaaaagcacggtgtccagcctaatcaaagtttgattgaagatattgtccgtttctttcattaattcctccgtgtttgatgtttactgcggttcaactagagttttgtttggg

SEQ ID NO: 1371 - DNA, 454 bp, Cyanidium caldarium
  Clone ID: LIB190-026-Q1-E1-E8
acaagcatctacagtgactcgtggtattttgagatcacacaaacacttgtacactgaatgaacgacgtatgggtactaactgtgcattttgtatagatatcaaggatgtcaaatatgttatcaactacgatttcccgaatactatagaagactatgttcatcgcattggtcgcactggtcgtgctggtgcccttggaaagtcccatacgtttttcactccggataaattccgtgttgcgaaagaattagttaacttgttgcgagatgctggacaggacattcctcccgagttggctcgtttgataaaaacttcgtcctttggcggtaacaacagaaacttttctcgttatcgaagttacaattctcggggcggctcattttcaaataatggacgttatggctacgggaatcatagcaataatttcggaaggagccgatagcttctaataaaaat

SEQ ID NO: 1372 - DNA, 430 bp, Cyanidium caldarium
  Clone ID: LIB190-026-Q1-E1-F1
tccggaaaaattataggaacgataggatgtggagttgcatgttttcgggatggcgactttacgagttgttgctttcatcaaccgtcaggtacgacattgaatggagatatattgtatatagcagataccgaaaatggatgtttgcgaatggtggatatagaaagcggtcaagttgagacgatctttcctgaatcttgtcgagttgactgtaataataataacatgactcgagcactagaattttccgatatttggagaactccttggaaacgtccaaaaaaagggatcctattgtatccgccaactttggacgacccctttctgttgtggtcaaggataaaagtatttctgtcctggctatagctgatgacgatatggttccaaaaaagagtttgcacagtaaaaaacttagcagcctaaaacctactat

SEQ ID NO: 1373 - DNA, 402 bp, Cyanidium caldarium
  Clone ID: LIB190-026-Q1-E1-F11
acgcgtccgaatctttgttgagttgtcgtcgtcgacgtattcagaaagaaccaaataggcacacgacttacaagaggactatcgtattttctgccacctcaaaccatgaaactagtgactcacaaattccccgagtaccgaacgttgcaccgagtgagaaaacttggaaaccgcagtggttgaggacagttgctcctgaaagcgttcatactcgttatggagaactaaaagatactgtaaaaaagcttggtttgcatacagtttgtgaagaagcgcaatgtccgaacattggtgagtgttggaatggtggcacagctaccgttatgttgttaggggatacatgcactcgtggttgtcgtttttgtgctgtgaaaaccaacaacaaacctcctcctcccgatc

SEQ ID NO: 1374 - DNA, 382 bp, Cyanidium caldarium
  Clone ID: LIB190-026-Q1-E1-F12
tacaagactctagactgagtcatattatgaggcgagaaagcataggaagtgatgaaatgcagagatctctagagaaaggcaagaaagaaaagaaaggaagacacagtaaatgaggcgagaaagcataggaagtgaaacggattacgaacccgtgtagtctatgcagtaaaagaaagaatgagtaagaaaaaagggagtcattccaccaggggagtaaaggcgcaagaaagaaacccaaagcaattgacgggaatcggaaaaaggggtggatcacgtaaattaatccgataaaccgagaaccttacctctccaagaaggtgttgcacggctgtcgaaagaacgtgctgtgaagtgagagaacgtacgagaaagccaagttagg

SEQ ID NO: 1375 - DNA, 461 bp, Cyanidium caldarium
  Clone ID: LIB190-026-Q1-E1-F2
cgtccgcagacgcatgggcggacgcgtgggcgtgtgtagcaagcgtagagcagaagaactgggtgtaaaggtcgagtagtagagtaagtgtaaaagggaaaggaaaggagagaaagaggaaagggatgaaatgcagagatctctagagaaaggcaagaaagaaaagaaaggaagacacagtaaatgaggcgagaaagcataggaagtgaaacggattaggaacccgtgtagtctatgcagtaaaagaaagaatgagtaagaaaaaagggagtcattccaccaggggagtaaaggcgcaagaaagaaacccaaagcaattgacgggaatcggaaaaaagggtggatcacgtaaattaatccgataaaccgagaaccttacctctcaaagaaggtgttgcacggctgtcgaaagaacgtgctgtgaagtgagagaacgtacgagaaagccaagtgaggaaaag

SEQ ID NO: 1376 - DNA, 451 bp, Cyanidium caldarium
  Clone ID: LIB190-026-Q1-E1-F4
gtccgtaggtacaggttacaataatgaagtatccaatcattttgtagataagcagaactgggtaatcgataccagaaaaaaggtttcttcttcgtcatctactccttcgcatgatatgaattactccaactccgatcaagagggtctccgtatcggccggaactgccaacttgtagtttgctcgatagaaaacttggaaaagttcttgggtaaagaaatttatgaccaaatccagaaagctcgctgctcggagagggaaaactttttgaccaatgtgactcctctatccagtctgataggaacgttgttcgaacatggatgggcacgcggtagatctgcggaacctgaagcgtatctcgaaaagtctattgagaagaatattggtgcgaatagagtagattcgactggcaaatcttcttcttctgttgtccagtgcgacaaggccagtttg

SEQ ID NO: 1377 - DNA, 231 bp, Cyanidium caldarium
  Clone ID: LIB190-026-Q1-E1-F5
tacaagcatctacagacactcgtgctaacgcgtgggtatgcactcgctcggaacggttatttgttttgtgtgttgttagatactttgatgtaaaatagttgacaagggtttattgcaaaaaggttgaatagtaactcgttctatatggttcgttgagtattgtctagagacaagtgggacaattagtatccacctttatcttcgcatatacataaatatatttatttattt

SEQ ID NO: 1378 - DNA, 459 bp, Cyanidium caldarium
  Clone ID: LIB190-026-Q1-E1-F6
cccacgcatccgcagacgcgtgggcggacgcgtgggatcttttcgtcgtcttctcggtgggcgacattctttggtggcttgtttttgattctcttgtctatttatggttccatgtcatcgtatatggctattggtgactatggttggtattatggcgactttttcttcgagccaaagacagattctcccgtgtataccggtatttatcgatttatgaataatccagattgtatattgggacatttatggatgtatggaatggcttggatgggacgcaattgggagacattttgggttgccttgttatctcaagccttcaatgtattatttttacatgtggtggagtcacctcatatcagtcgttgttattcgaaacgaagacaagcggcagcattggaactctcttttcgtagaggagcagccaaagtagtgtctgctcctctcgtgcaacatttgacc

SEQ ID NO: 1379 - DNA, 403 bp, Cyanidium caldarium
  Clone ID: LIB190-026-Q1-E1-F8
tccaagcgggccgccaaaaagtttgtgtttatcgtccgaaaatgtggatatgacgaggcaaaattttcagagtttaaggttcaaaacgtggttggtactagtgctgtgaactttcctatacgtttggaagcacttgctcaagcacatacaaagttttgtacatatgaaccagaattgtttccaggcctggtctatcgtatgatggaacccaagattgtcttattaattttcgtttctggaaagttggtactaactggtgggaaaacaagaaaacaaatagatgaagctctagagaaaatcaaagacgttctcgttgcctttaaaaagaagtaaatacagagacagtctccattgtttactttgcaacttaaatataaagggcgcgcattttttcaaataaaaa

SEQ ID NO: 1380 - DNA, 321 bp, Cyanidium caldarium
  Clone ID: LIB190-026-Q1-E1-G1
ccgaaagatcaagcttccaagatgatagaaagagaagttgttgtggataaggacgaaggcgttcgtttaggagttaccatgtcttcattggcaaagttaaaaccagtcttcagaaaggaaggcgccaccacagcaggaaatgcctcgcaaataagtgatggagcagctgctgtcttgctaatgaaacgttcggaagcacagaaaagaggacttggctgtctgggtactcttcgagcttttgctggcgtgggagtggaaccaggtgtcatgggaattggtcctgctgttggcaatcccgcattattgaaaaagccaagattg

SEQ ID NO: 1381 - DNA, 414 bp, Cyanidium caldarium
  Clone ID: LIB190-026-Q1-E1-G10
acaagcctctacacagacttctgggatagaccatggatagaggagtggcttttatttctatactttctaaagggcttctttatagaaaattttggaaaagaatttatcatgctcatagtcataaaacttgtttctactattgtgtattatccaacctttccatggttgcttccaagaacaattcggcaggttcccgtaagaaaaagagcaaaaggcgttggaaacaaagagagttggcgagtggcgaagatacgaagaaaaccagattttcagtacagtgggccaatattcatttgtcacctgaggaaataggtaaaaaatatgtgatcacgcagacaggagacttggaagatggggaggatttacgacagtctcaagagtggaaggactttatttccaccttggactttaaac

SEQ ID NO: 1382 - DNA, 432 bp, Cyanidium caldarium
  Clone ID: LIB190-026-Q1-E1-G11
acgcgtccggacagagacatgaaaaagaaatgagtggagtagtacaaggagcgaagatgatgggagcaggaatggcaacgataggtttagcaggagtaggagcaggagtgggaatagtatttggaagtttggtgaatgcatatgcaaggaacccagtattgaagcagcagttatttggatacacgatattagggtttgcgttaacagaggcagtaggactgtttgcattgatgatgagttttttgatactgttttcatagtataggagaaacaagaagtagaagagaaataaaagagacagaagaggagttatgagagaaaagatggaagtaatagaagtggtaagtggagtaataatgaatcatatgaaagaaggaatggagaatataaggaaggattacatgaaggaggagataataagagaaatgataa

SEQ ID NO: 1383 - DNA, 442 bp, Cyanidium caldarium
  unsure at all n locations
  Clone ID: LIB190-026-Q1-E1-G12
ccacgcgtccggagaatatgaggaggagtggctgtctctttgcctctccaaagggactttattggaaaagagtcttctctacagaatatgattatacaggaggaactggaagagaatccacaggattgtcggcttccgaacaagaagcaagagagaaagtaatacgtttgtatcgatatgcgctaagtagtgtcaaagatattcgcaaacactatcgtttaaatgaaagcanagaagatatagctgcttgtattcgagatttatttgaaaggcatagacatgttcaagatcganagcttattgatatgttggtgttcaagggacgacaggacatagacgaagttcgcgcccagtggaaaggtcgtcatcaggttctcaacctattaagagcatttgaagaaaagaaaattaaagaaagagcgcagcttgttgatgaacaaca

SEQ ID NO: 1384 - DNA, 368 bp, Cyanidium caldarium
  unsure at all n locations
  Clone ID: LIB190-026-Q1-E1-G2
gggttggtgttttttttttttttttttttttttggtttgtggtgttttttttgttgttttttttttttttttttttttttttttttttttttttttttttttttttttttttttttgtttttttgttttgtttttttttttttttttttttttgtttttttttgtttttttttttttttttttgtttgttttttttgttttgttttgttttttttttttttgttttgttgtttttgtttgttnttttttgttttttgtgtttttttttttgttgtttgttgttttttttttttttttttttttttgtttgtgtttttttttgttttgttttgttttttgtgttttttttttttgtttttttttttttt

SEQ ID NO: 1385 - DNA, 291 bp, Cyanidium caldarium
  Clone ID: LIB190-026-Q1-E1-G4
ctctatagagacacttaataggagctcaaaagacagcagtctttgggtcggcaaggagttggtcacgatgcatgctttgacggtacttgtctttattactgagaaataaaaactgactatcctttcatagggttcacgagcgggctcgaaagttgctgaaggaatcctcgatgttcagttttatacccaaccagcaccagaagcttcatggaaggttctgtaagaaaactagttcgagatagctataggatggaagctttaataaaaagccagaatctgattcaatatttt

SEQ ID NO: 1386 - DNA, 447 bp, Cyanidium caldarium
  Clone ID: LIB190-026-Q1-E1-G5
cccacgcatccggagccattcaggaacgatatgagcaggagttaagaagatgggaggaagtgataagaagaaaggaatgaggattcaagtagagcaatagaaggaaggaaaagaaggaagaaagagaaataaaggatggtagagaaaagaccaagagtaagaaaaggaggttcaacaggcatagcaccaatccaggtaagaaggaagaaggaagcaaggaaaaggaagtaaaagaatcggaagagaggtctaaagagagaactacgagaagagaagctgtgtatccaaggaagaagagcaagtacagcaatagaggaaatcatgacaaggacaccagcgagtataaaggaataatgatcttaatagggataggagtatcagtggtaataggaggaagaagatggctaaaagaaggagtaaaagaatggataaagagtaaggaaaaga

SEQ ID NO: 1387 - DNA, 436 bp, Cyanidium caldarium
  Clone ID: LIB190-026-Q1-E1-G6
atggaagctactcgacagttggtagaaaaactaaagagagctattattttacaagaagatacaagctattcggattcaggagatcaacaacagtttgccaagtctgctagtatagatagcaatagtcatgaacatcgaagttggaatagtgatggatcatttaccgaagcaatggaagccaaatatagcagaatagcggggtttacggaatattatccactcaaacacgaagactttgatgtcaattctaaaacttacaagatttttcatattcacgagtacaattggtcggatcacggatatgctttgatcaatgcgttttatgaagatggagaattggcttctttattggataagcagtttgacattatttaccacttgacagataacagtataggaatgaatgctaatgtagatacttctatctttcgtagag

SEQ ID NO: 1388 - DNA, 440 bp, Cyanidium caldarium
  unsure at all n locations
  Clone ID: LIB190-026-Q1-E1-G7
cccacgcatccgcattttccaagcaagtcttttgtttgccatcaagttttttgggcaaatattcttatttcaaaaacgaaatatgaacatacagcaaaccattccctgtgtctccatcatagtggatacgtgttgtcccagtatgctacgtcttgtgcggtctcgtgcgacttgcgacattgcacgctctgtggactgtccaatttcaattcgttggtcgttaataggtgatctctgtttgtacgctttcaaatgcatagctgaaagattggccaaacggaaaacaaagtcttccagttggttggcgccagttgcccgagagttgcgtgaatgttttcaatctcgacaactacctaaccaaacacaactggaacagtatccttgtcaacattcttctatattgtggaaactggccantanattatgaccccatgtttact

SEQ ID NO: 1389 - DNA, 456 bp, Cyanidium caldarium
  Clone ID: LIB190-026-Q1-E1-G8
cggggccacccacgagtccgaatggatacttttttaatatttgactccaccagtcaacgattcggtgtcgctgctgaacacgtttatgacgtaaacgagaataccaagttgcgttttggtgggaaagttcgtcacggagaatcggacccggcaggatatgtcattgccgaatatgactttacggtttccaaagaagattttccgataaacgttcgtgcacgtgcgatatgtaaaagtaaccagtgcatcggcgatattcgtgccaaaaagaagtttgaagtggacgaagacacttctttattcttcttagccaaagcttgtactcaggaactaacaaaaggaagttatattattggtaaagctggagtgacacgtgactttcgtttgggtgaagacacttttcggttgggtgcggtgtgtgaccaagatggaaactgtcgaggtgctttaagaaat

SEQ ID NO: 1390 - DNA, 429 bp, Cyanidium caldarium
  Clone ID: LIB190-026-Q1-E1-G9
cacgcgtccggaagcatttctgtaacatttttcttttcctccaaaaacaagcgggacggcttcctatggggcatttgaatggcattgtatatatgaaacagaaacaagccgggtcaaaaggtgaagagttggaacgcatacaactctttcgcatgagcacctggcaaagaacaaatggtgtccatttagcaaagtattgacttgaccttactttgccagtcaacaccaaacaagcgttgcttctagaagagcccgccaatttttgaatttaaaatgagggtccacatgagaaatgccaacctccccttggccattgtgattgttcgtattgttgttggaggtgatagtgattactccaaagtgtggttagatgataactcctagaaaaagaaagcaatctgaacgtgaagaaacacatgttgacaacgc

SEQ ID NO: 1391 - DNA, 408 bp, Cyanidium caldarium
  Clone ID: LIB190-026-Q1-E1-H1
gtccgcaaacgcaaccgcaacccgaatgtggcaagttggcaagcaagtcagaaaaacaagagaggaatccagtattcccatcgttcctttttctgcaggtgtatacattgcagctatgatggctcagattgacattttgatggaaaagggacatccggtttcggaaattgtcaacgaatccgtcatagaatctgtagactctctcaatccatatatgcatgccagaggtgtttcttatatggtggataattgttctactactgcaagacttggtgcgagaaagtgggcacctcgctttgactataacatttctcagcaagcatttcctgttcttgacaatcaagaaccgttggacatgcgcaagttggatgaattcttaagtcatcctattcattcggcggtattgga

SEQ ID NO: 1392 - DNA, 441 bp, Cyanidium caldarium
  Clone ID: LIB190-026-Q1-E1-H10
cacgcgtccgcagacgcgtggggttgaatgaaagcaaccacagctttcctatgttgtctccagaagagtcactagttgaaccaagtgatatccactacaggaacagagcctttgacagcacttcagaagtgtgtgatttacctccagctgtgagagcaactgtggagcttttggatattttaatgcatccaatttttgatgatttatttgaaggttgtttacaagaggcactgattaaaggagaagagttgttcgaaaagtgttacgataaggaggaagaaggaattatcacaccttacactatttgttcacagtcgcgtatagtttttccccgacttggctattcgcgtctcaaatgtattgaagttgtttggaaacttgtttgttttcgttttgaatgtataaataatttgttgtcctaacaaggcatcttatcgcgat

SEQ ID NO: 1393 - DNA, 406 bp, Cyanidium caldarium
  Clone ID: LIB190-026-Q1-E1-H11
ccacgcgtccgaattgtttcgacaatatgtcagactcggataggacccaacaaaaagaacaagcttgctcctcggaagagaggaaaccacgaaagaaacgtgctcctccaggagaatttgataggcaagtagaggcagttcgtaaagaaatgcaagcaatcaaagagtcactggaagaaacggagaggaaacttcaagaggcagagaggcttcgtaatttacatggctcagagtccaaagaagaagaaggtgacgcgcaacagacaggcacttcttcagaacagttgaaacgttgaccgttgctagttgtgtttttttggcaaagtcagaagagacacgaatcttgtcttttcataagcggattgactctcggcttacatagtataaggttttggaaactgtgttt

SEQ ID NO: 1394 - DNA, 342 bp, Cyanidium caldarium
  Clone ID: LIB190-026-Q1-E1-H12
cacgcgtccgcaacccacgcagaaagatgaagcaaggtgatccgaagcaacttcaaaacaaacgcattgtcgtttggaaccttccttctcacgtgagatggcaagagttgaaagatcttttcaaggaatcgggaaatattctttggacagaagtgaagaatgtgcgaacaaaggatggtggtgagacagtgatgggcactgttctgttcgaatccgaggaggacgcaaggagagctgtggagcgtatgagaggaagaaactttttaggtagaattatcgattgtcgatttgatagtcttcgttgaatagttgtagtaaaatatagaaagaaatgcttttcct

SEQ ID NO: 1395 - DNA, 404 bp, Cyanidium caldarium
  Clone ID: LIB190-026-Q1-E1-H4
ttgtatatcgtgtgaagctcgacagcgtctctacacaaacacgcaaggtttcttggcgggaaatacttgcgactactagggtcgttactttaaagagaaatgtgagagcactggtcaagttttagtggacttgtgagggtattgcttatgatagccaacctgtggtgtcagttgtttatctggcgttacaggaagacgtgtgacaggagagctttcctttatcagacaaggcagttgtaccgatcaaacacttgtgacaacctgactcgattttactgatagatattccgttcggttgtttttgtactgctcgtcaagtcctgaacagagctggtttttagattttgatgataaacaggacgactttcttggtttttgaagtaacttttccgtctccaaagctg

SEQ ID NO: 1396 - DNA, 443 bp, Cyanidium caldarium
  Clone ID: LIB190-026-Q1-E1-H8
cggaagtccaatgcacaagagcgcccacttgtctttgtgacaagacaagaaagtttctcagcagctcataggtttgtcctacaagttttgttaccaacgagaaccactcaacgtaacgtgcttcagactgaatagttcgaagctgacggaagaagaaaatgtggctatttatggaaagtgtaacaacgaacactttcacggacacaactatactgtgaaagtaaccattcggggtccagtacatccagatactgggatggtagtgaaccttagttcgttgaaggaagccataagagaactcattgtggagccttttgatcacaagaatttggacttggatgttttcgaattctgcaaattaggtattcctagcactatggagaatctagttgttatcatatggaagagattattcagtcggttcaaggacttgctttacgaag

SEQ ID NO: 1397 - DNA, 389 bp, Cyanidium caldarium
  Clone ID: LIB190-027-Q1-E1-A10
ctttttactatatcgtgttgcgattctagagcatctgcacagagagaactaaccatggatgatcatccgttggtggaagagcaatatgatgatgaatggataaagaagcccaaggttgctcacaagaggggttgtacgaacttgaccaacgaaagtattttgaaagcggtgcagcagctatccagaggcgaagctcactacttacttcggcaacacgttttgacaaggctcgagttgcattctcatctcgtcaacttaatagagctgtgtcaacaactgcttgccaattccgatggcgctcgtttagcctccttgaattatcagtgccaccacttttcagtgactagcgacaagtcaaagctcctgaacgctttttgattttcccatgt

SEQ ID NO: 1398 - DNA, 332 bp, Cyanidium caldarium
  Clone ID: LIB190-027-Q1-E1-A11
tcatggctgcgctccgttgcgtctccagctgcgaggttattgggttggcgggattatggctctcatgtatcgggatttgcgaatcgaccagtgctagtcgataacagtacgtggcataattctcacattgcggcggttggtagagtattaagctcaccagtcaggaaggcgtttcagatatgctagtacctgggtgtcgattacgtgttggtgatatttggtggtgcgtcacggtatagttcgcgatgacatcagcacgtttctatgggctattcgaatttctcattcggttgatccgacagtgcgtcggtgtgcctatcttacagccggtg

SEQ ID NO: 1399 - DNA, 382 bp, Cyanidium caldarium
  Clone ID: LIB190-027-Q1-E1-A12
ctgtgaaaatgcagtaaactagcagtaggacggaaagaccccataattcttgactagataggtttagggaggagagagaatcatgaagtagaggaggtggggtaagagatgaaagaccactgcatgaggataaggaatctaactgagtaaggaaaataagcttaagctagtttggctggggaagtaaagcctaagaaagagtaaattaggcaagcaaaggcatgagagaagtataatagcagaagcatgcttgaagaaaaagaaagagatttcagaaagggaagaaaagtcagctatagagaacatgtgaaggagaactcaaaaagaggagagcaccgaacgatcgaagaagaaactttgggggtaacacgttaatgtggtg

SEQ ID NO: 1400 - DNA, 225 bp, Cyanidium caldarium
  unsure at all n locations
  Clone ID: LIB190-027-Q1-E1-A2
acgcgtccggacangcgtgggcggacgcgagggttcgagcgtttgagttgtcgatgaagaagactcactaaccgatggaatagcacaaaagggagataattgggaaccaaacctgggaagtcccaaccagctggatccgaaaggaaagcaaccaaatggggccttacagtggaccacgagtaaaggtaaaagttttcccccttggtttgggggggtggtgaaaaa

SEQ ID NO: 1401 - DNA, 470 bp, Cyanidium caldarium
  Clone ID: LIB190-027-Q1-E1-A6
ccacgcgtccgcccatctgcaagagtaacatcctgatgaggcagttgcctatggtgcggcagttcacgctgctattttgactggtgatgccagtgagaacacgaaggatcttttgttattggatgtgacacccttgagtttgggtatcgaaactgcaggaggtgtaatgacaaaacttatcgagagaaacacgactattcctacgaggaaatcacagatattcactacgtatgccgataatcagcctgctgtgactattcaagtatatgaaggtgaacgtgcgatgacgaaagacaataacttgttgggtcgttttgacttgacaggaattcctcctatgcctcgacgagttactcagattgaagttacctctgatattgatgccaatggtattttgaatgtgagtgcagtggagaagactacagtaagagtaataagataactattaccaatgataacggccgcttatc

SEQ ID NO: 1402 - DNA, 414 bp, Cyanidium caldarium
  unsure at all n locations
  Clone ID: LIB190-027-Q1-E1-A7
tgtatgaggttgaaaagaagaccgcagaatatgagataagaaagtaccccagcttaagaatagctgaagttcatcgttcagactggaaaaaagaagagaatggctcggcatacgactttgagtcgcaagcatttcgagtgttggcgtcgtacattggtgtatttggagaacccaaggacaaagatagctccaacacgcatgttaagatagcaatgacagcacctgttttatcacagcccatagggtccgtggaaacacgaatggacgacagcagtctagcgtttatatttgccaaagagtatgcagagcaacaagaacctccacagccatttagaccacgagttcacttgcgtantgtacctgtcagaaaaattgcagcgactacttttagtggtactgtcaatcgtgaaacat

SEQ ID NO: 1403 - DNA, 476 bp, Cyanidium caldarium
  Clone ID: LIB190-027-Q1-E1-A8
gcggacgcgtggggtttcgtttgtatttgagtggaaaggaagtcaatatcgaccttgttgctattttaaagtgcttcttatattccttggagttcatatggtctattgtagtttttgcggttagtgcttcaaaggcaaagtcgccaccaggtacttgtcagtatggaccaatgtccgtttgcaactttgggatagcttggggtgttattggctggctacttactatattaattattgtgttggttgttcttcacgtggtgaaagacgcctcctttactcccctaaaggagtgtatagcaaatgccgtcatggcggtttggtggtttattgcagctgttgttttctctgccaaagagcacgatcacgtcagtgaaactagcactacgatcacggcattttcctggatgttggctatacttgctgcctgtagctcagctctggccttgtatcaatctcagagagagacggaagatgat

SEQ ID NO: 1404 - DNA, 481 bp, Cyanidium caldarium
  unsure at all n locations
  Clone ID: LIB190-027-Q1-E1-A9
gcgtgggtgcgatacnattaagagtgggcctcccagacggaagtgtttccactttgcaagtggaacaagacgctacagtagaccaattaaaagaaaagatataccaagaaaagaagttggaccccaaaacaaaacggattcgtcttatttattcgggaaaattattgagcgaaggaacttcaaagttagtagattgcaaagtagaagatggctcctatgtgcactgtgttatctcagatgaagttgcatctggtcgtacgaaccacactcaggaaagaagcgaacgtttacagactcgcattcgcgtggctgatccccagtcagagtatcgaggtttggaccgtctccgtgaagcaggttttaccgacgaagagataactgttctgcgacgacaatttgctcgtagtcaaggtctcagccctgagcaagtagaacatataaccgacttgagagaaatagaggaacgatggatgggagatgc

SEQ ID NO: 1405 - DNA, 392 bp, Cyanidium caldarium
  Clone ID: LIB190-027-Q1-E1-B10
gcaatgcaggtttcttgaaacgcgccatgttccattttgcatatcagcgacagctggaacgagtgaagaatggctctcgatcgtggcttatggacaagttagtattcagcaagataaaggcttctgtcttccctcgcctacgatttatggtatcgggttccgcccctctctctgcagctacacataactttttaaaggtttgtttcatggtcccagtactacaaggttacggattgacagaaaccactgcaggagtcacaatatgcggtccagacaatcctgcaggttctgtgggtggtcttttgcctgttgctgaaatcaaattgaaagatataccagaaatgaactatacgtccaaagcacccggcggtccgaaaggaaaggtttgtgtc

SEQ ID NO: 1406 - DNA, 474 bp, Cyanidium caldarium
  unsure at all n locations
  Clone ID: LIB190-027-Q1-E1-B4
acgcgtcggngcgaccgagcaagaagagaagagagaatgctgggtggagtagcgaaacatgagaagggaagtaaaaggtaagaaagaggaaaggtttacgagagaaggaagtagaaagaagagagtgtaaggcggcgtcataatagaaatccgaaaggagtagaagaaaagagagagaagaaagaaaagaagagaaaagccgtactgaagaccgacacaggtactcgaggagaaaggagacccaaattaaggtgagagaatggacgataaggaactaggcaaaaggatatggtatctgcggtagaacatatgaaagaagcagcaccgactgtttagcacaaacacagcactctgcagaaaagagaaaatgtaaagtatagagtgtgcggcctgccacatagtagagaagacatcgatgaaagtgagagcgagtaaaagatgacgtatagagaatggcggtcctaacggtaagga

SEQ ID NO: 1407 - DNA, 437 bp, Cyanidium caldarium
  Clone ID: LIB190-027-Q1-E1-B5
tgctcggtgagtgatcaagatattattcttatatgttttatgtttggcacattttcctcgtggttcgatggatagagaagttgttcaaaagatggttcaattgattcgtttcgtccatcaactcacgcatcggtcggttttatcagcgggtgcgattcagactgccggtctaaagtctattagtgcgaaacatttggctatggcatatcagagccttcaatttttgtctcaatatatggatatgttactcgatgcactatctacttgggtggtaatcgatcctcatacgctttccgactttcagaatgtacaaagagagttgagagatcatcaaggtcaaatattggcgaaactttgttccatcatgaacgaacgaatgtcctatcatcaacagagcatcgagtcgatggcttggaacaacgattcgctgttggaac

SEQ ID NO: 1408 - DNA, 370 bp, Cyanidium caldarium
  Clone ID: LIB190-027-Q1-E1-B6
gggagtcgccttttttggttttggtgtacgttatttcagaaacaatggaaagttggttgcaacaccttgaaaaacaactagaagaagcgaaaaattgtaatgataagcgagttgcagaagaaaaagttcaagacgtgttgaaaagtagttctgaaatgtccaacttgctcgtttccgtgctacctgaaccagttcgaggacattggcaaaaacaactggaaaggttgtagaatgaaaagacgcaaaaaggagtttgctgttcctattgtgcaaatatcatttcgagtgaccgaatgacgtcatgtccgctcggttgtccagacaagttttgcaataaaacttgtttgaaagaaggattggaagaacatag

SEQ ID NO: 1409 - DNA, 421 bp, Cyanidium caldarium
  Clone ID: LIB190-027-Q1-E1-B8
ttactgcagcctgtgccttgggaatgacgagaaaggatatcgaaatattttgcactcgactggaagagtgttttcaagaagcttatgagaaattggcattgcagaagaaggaagaatatttatgagtacatctttggttttctttctttatccactctatgtataatttgcattgattcaagaatgccaatatatctgtatacaaagagttccaatgaagaatcaaagttatttgaaacttgaaataccgtatgtcctcgagatatcatctgtattatccagaataactctctaaaatatcatccaaaaaaaaaaaagttgatccatctcgctatctttgtcattcattatttacttactcgatagaaaacggtccgtcaagcagcgtcttttggattggatatattttgttccataaatg

SEQ ID NO: 1410 - DNA, 183 bp, Cyanidium caldarium
  Clone ID: LIB190-027-Q1-E1-B9
acaataatttaaacaaagactgcgtcagagtagtagctaagtttgactccttaggggagatactacctcctgaactcgtgcgtgacggataatgttttaacacttttccacgttgctgttctcagccaaatctcactgttgagcgataacgacgatatagccgtttcaggggctttggttttc

SEQ ID NO: 1411 - DNA, 464 bp, Cyanidium caldarium
  Clone ID: LIB190-027-Q1-E1-C10
aggaagtgcgaatgtggatgaaggactgcgaggttacttgaccaaatatgattgtagcagtgccgatatcaatcctatcggtggcatttcgaaagttgatctcaagtcgtttcttcgttttgcttcgaagcctttggaagaaaatggattgggatacacatctttgaaaagtgttgtggaagctcctcctactgcggaattggagccaattacctccacttatacgcaaacagatgaagaagatatgggaatgacttatgaagaactaacttggtatggtcgtcttcgtaaattgggtcgttgtggaccagtgagtatgtttctctacttgtcgcaggtatggaagcatctaagtgtgaggcaagttgcagataaggtcaaatttttctttcgtatgtattcgatgaatcgtcataagatgactacgcttacgccttcttatcatgctgagaattattctcctg

SEQ ID NO: 1412 - DNA, 127 bp, Cyanidium caldarium
  Clone ID: LIB190-027-Q1-E1-C11
tttggatttttcgcacctatgaaaaatccgcctttaatcctttggtaaacaaccgaagcctggcaatgcaaagtcccgtttggccccgtttcttggcaattcgactgcggctgaactttcgggggct

SEQ ID NO: 1413 - DNA, 306 bp, Cyanidium caldarium
  Clone ID: LIB190-027-Q1-E1-C12
gattttatacagttacttgagttgttacatcttcaaataccccaagataacagtttatcaactccgatgtcctcgtttccttccttttccaagtgggcgaacaagcacagtggaaacatcgactagtcgtcgtcgtttttcttgttgcctttcacgagactcgagactgcagttttggcgctgtccatagcttctgtagtttgtcgaagcattcttttagaaagtttttccccaaatatctttgtattatctatgtattgtgctcttagtaaagtattcgtaagggattggcagtgcaaaataaaa

SEQ ID NO: 1414 - DNA, 612 bp, Cyanidium caldarium
  unsure at all n locations
  Clone ID: LIB190-027-Q1-E1-C5
gagttgctcggtgatgatcaagatattattcttatatgttttatgtttggcacattttcctcgtggttcgatggatagagaagttgttcaaaagatggttcaattgattcgtttcgtccatcaactcacgcatcggtcggttttatcagcgggtgcgattcagactgccggtctaaagtctattagtgcgaaacatttggctatggcatatcagagccttcaatttttgtctcaatatatggatatgttactcgatgcactatctacttgggtggtaatcgatcctcatacgctttccgactttcaaaaggtacaaagagagttgagagatcatcaaggtcaaatattggcgaaactttgttccatcatgaacgaacgaatgtcctatcatcaaaagagcatcgagtcgatgccttggaacaacgattcgctgttggaacaatgggaacttcncagtccttatatgcagtccatcgttcgagagttgtttgttctcgacagaaatatccacaccttggggatggcacgagagtggaatgacctgtctagtcgggataaattctcntatgcggaaaaattgacaaacgtatatgaaagtctaaagtcgatggg

SEQ ID NO: 1415 - DNA, 472 bp, Cyanidium caldarium
  Clone ID: LIB190-027-Q1-E1-C8
cgcccacgcgtccgctctcccgttttgaatgcattcgatcagtgttcgttgcaacctgcttcttacgacatgcctaacttatctcatcttcctacatgcgatatgtatcttgtatggttgggtgaatcacctcaagtcacgtcctcaagctgttgtttcgtttggaaacctcgtttcttgggaaaaactacccaaccagtttggtgagaacgcagtggtcacttttcaactggacgcagacttgcaaagcttgtggaatctcaacgtcaaatatgtatatctctatttggttgcggaatattcttcgccccggttcccgtggaatcaagtaaccgtttgggatcgttatgttgaacgaggttctactgtgttttccgcttttccgtattacaatacgttgggtttgcacaattacgtggatacgctgagaaacgcaagtctggtatttcgtccggaagcggatatcattcct

SEQ ID NO: 1416 - DNA, 248 bp, Cyanidium caldarium
  Clone ID: LIB190-027-Q1-E1-C9
tccgcttttgaaaaaccttttctgattctgcgaagcctgcatggtgtaattggtctctatctgcttccaattctcgttatcctttgtctttgcaggcgatgcagttggaataagagagaggacaatgggaagagaaagctttaaaggcatggagagaaagcagtttggtaggattgctttcaatgaaatccaggccttgggacataggacatacagtacgttctccgtttgtcgatatttagacagct

SEQ ID NO: 1417 - DNA, 417 bp, Cyanidium caldarium
  Clone ID: LIB190-027-Q1-E1-D10
acgtgctgtgaagtgagagaacgtacgagaaagccaagtgaggaaaagaaggcaagtatagggcggcccgagaaaggagagggcgtaagacgtgatacagagtacgaagaaaagagaagagagctagaaaggaggtaaaagaagagtaaaaggactagaagaggtacggaattcacgaggaaggagcgtgaaggaaggaggaatcccaagtaatcgaggaagaaaaagcttcggtgaaagcgtgaacggattttgtacacactgcccgtcaagttctggaagtgtgctaggaataagcaggggaagtaaaaggtaagaaagaggaaaggtttacgagagaaggaagtataaagaagagagtgtaaggcggcgtcataatagaaatccgaaaggagtagaagaaaagagaacagacat

SEQ ID NO: 1418 - DNA, 364 bp, Cyanidium caldarium
  Clone ID: LIB190-027-Q1-E1-D11
gggtgggttcctttaggaagcagccaggatttgttcgcctctttaccttttccaactatttcttcggttggaagtaatgcagctattattcactatcgaccgaatccaaaggattgtaaacgattagatagtgaggatatctatttgtgtgattctggaggtcagtatagagatggtacaacggatgtaacgagaactttacattttggtactccaacgcctagagaaaaggaatgctatactcgagtattaaaaagtcatattcagatggacactgcagtattttccaaaggaacgagtggatttgcgttggattgtttgaaaagagctcccttatggaaaagttggtttggactatcgacat

SEQ ID NO: 1419 - DNA, 501 bp, Cyanidium caldarium
  unsure at all n locations
  Clone ID: LIB190-027-Q1-E1-D6
ccacgcgtcgggccagctatagaagctataagggcacaaatcnctggtgcgcctggaagagttgctgctagacttgtttccgttttcggttcagctggaagtggagatgtgttaaaggtccaagagtatcttaatatttgtggtatgcatcccactgcgcatttggaaggtagagaagaagaaacaaattcaacggaagagacatcgtctgctggtggtaacgttcctccatcgaatacagatcatgaaacgtcttcttccgcaacgaatcaggcatccgatcataccacaagagataggaaagatggaaaggagttgtccgatgagcaaacggtagcttgtctcggaattgcagctattgctatgagagaagatattggaacagaaatggcttttcgtatttatggccatttgttgcagtatggagaccctgctgttcgaaagatcgtgcctctgtcgttggggctcttaactgtgtcntatccacgtttgcaagtgatg

SEQ ID NO: 1420 - DNA, 466 bp, Cyanidium caldarium
  Clone ID: LIB190-027-Q1-E1-D7
ccacgcgtcggcccacgcgtccgcccacgagtccggtaatttggtttgtcgtcaaacagaagttgaattggaaatacatgagcgaggaatagagcttgctttggaagattttctccattccaaggatcgcgcactcgttcgacaaataagaaaagtagaacatgtgcctagggagtcgttgatgcaacattccaatattacaacacgtgaggcttgtgtcgctgtggtaaatattgtttccccaagtgtttcttgatgatacaagtttgtctaagaatcgttgaggagtctaaccgatttgttttcaccttgttggaaacttatggatacaactcagagctctcatgtggtcacatcgaagcaaagtaatagcctacgtagttggaacgcattgtttgcattgaccgtacctagtcggtctgcaagttacgagtgccttgctgctcagattatcgatgcacgtcga

SEQ ID NO: 1421 - DNA, 575 bp, Cyanidium caldarium
  unsure at all n locations
  Clone ID: LIB190-027-Q1-E1-D8
tcttgcgcattgacaggtcttggcgcaatgaagacagttactttgtatggagtttctttgccactatcagttgcttgctttttgtttcagtttattacctatcatattacttgtggtttctttgcgttcatagactattataagcttcttccagatcagaagctgcacaattcagaccacaaaacttatactcagttgctgcctcgagttgtgtttaatcagattgtcttttatctgcccagctttgttcttttgcagtatttgggagttgcgttctgttcctttgagcccaagatatctatttggctgtttgttgctgattatcttttctattctttccttcaagaaattatcttttacagcggtcatcgattcctgttacattccaagtggggattccagttgttgggacatgaattgcatcacactaccaacggttctgtagctgtctcgcaacactatatggcccctattgactatcttattgagatagttattaccaatatgcttcctttccttttcatgaagaaaaccaatctatattttgagatgttcgtanatactctgaatacaat

SEQ ID NO: 1422 - DNA, 371 bp, Cyanidium caldarium
  Clone ID: LIB190-027-Q1-E1-D9
gagatcaccgattttctactggttctgttgtcaagttgcataaaattgccgaacgtatcccagtggaagaaggtggtgaggaggtcgagtcggtacgtgaggaatacaccaacgtggaaaataatgaacattatacagcgaagcatgaagaataagaaattgtttccaagtttgttcgttccaaggcagtacctggttcttcgaaagcatcgagtaagggtatcatgatgggcgaaaagggatgtacaaagagtatgaaaactgctacaaacaaatgaagtactcgatcttccatgcactcttgccaatgtcatttgttgcattcattggaacacttcattttgcaagtcataaaacgcattttttcactc

SEQ ID NO: 1423 - DNA, 367 bp, Cyanidium caldarium
  unsure at all n locations
  Clone ID: LIB190-027-Q1-E1-E1
gagaaaattctcgagagtaatagacatgtattggataagctggccactctgttgatggaacaagaaacggtgacaagtgaagaactacaattattgctggcagaaaatgaagtgatcatgatggactatgaggaaactccaagtgcgcctattgaaagtagaaatatttggcaganatataattctacaccgtcggtcgtagaaaatggaagtccttcaaaaataatagatagtgatggagacttgtgatatacaaaactagtctgcttccaccttttttcggtttggaggagaactgtctgcaagtaaaacttcttccaatacacccgctggaaaagacgcttctggttggtanggcttgttattt

SEQ ID NO: 1424 - DNA, 377 bp, Cyanidium caldarium
  Clone ID: LIB190-027-Q1-E1-E10
cttcggggttagaactgttcacatggcaactgatggcgattccaggcattgattatcgaggagctcaagaagttgtatcatacggaattcgctctctgacagaacttggagagcagttggatcgctactcaaggcgtgacgaaagaattgcgtggctgcaagagatatctcgcaaatgcggaaagaaaaggtggaatcgcagcttgtatgaaacgatggaagcgctattttgctccattggtggtacttatccaccatagaacgaaacgcagcaagaagtatccgtcacaatgtttcttcaggttttcttctaggaagattctgcttgggttgtagtagtattcacaagcaagtaaacaacggactattgtctacaa

SEQ ID NO: 1425 - DNA, 318 bp, Cyanidium caldarium
  Clone ID: LIB190-027-Q1-E1-E12
tgtggtatagagaatggcggtcctaacggtaaggatctaaaggtagcgaagtatatagacgtttgaaaggcgtccagtatgaaaggagaaacgagtgtagcactgtctagtcgtccaactcagcgaaacagcaataactgtgaaaatgcagtaaactatcagtatgactgaaagaccccataattcttgactagatacgtttatggatgatagagaatcatgacgtacaggacgtggggtaagagattaaacaccactgcatgatgataacgaatctaacttactaaggaaaataatcttaatctactttggctgggg

SEQ ID NO: 1426 - DNA, 356 bp, Cyanidium caldarium
  Clone ID: LIB190-027-Q1-E1-E6
aggatcgacctgagtatcatgaagacgagtgggactatctgcagatcgcacgatcaaggacatcggcgtgtgagaggggcttggttgaggattgcatgaaagtaggttgatgatatagtggagtgctcctaccttttgcacagtgtgtcagcgactgtgagaggaagctttctgttgcacgtgtaagtcgtgatttaagacacgatgctacttgatcttatgctgtccaatccaagtaaggctagaacagtatctgtggtaaaagatttggcacagatgcgatatggggtgaaacgccaatcatggcgattgatatctggtactcctcgtcatctatagaagtagcgtatgcacgt

SEQ ID NO: 1427 - DNA, 450 bp, Cyanidium caldarium
  Clone ID: LIB190-027-Q1-E1-E7
ccacgcgtggccaacgcgtccgcggacgagtgggacactgggtagatttgaacaaggactttcgaagcccataaccgttatcaaacggcaagatcgagttggcttgggagccgaacaaaagacagtctggaatgacttgtggtgggaaagatatctatcggaagcaatcaggaagaatctccaacgttttgaaagatccacgacggaaaaaggtgaagacattgcagaggaaagtactgtctcacgaaaagaacggaggaggaagaagaaaacaagtagttatcgttcgaagaaacgaaaagaaagagctataaaggaagatgggaaaaaacgaaaggctcgcagagatagataggatgtattcgcaaggtttaacatcagtacgactagtgttgtttatatcgaaacgataactctttgatgtagaagtcagtaataccggataaaata

SEQ ID NO: 1428 - DNA, 484 bp, Cyanidium caldarium
  unsure at all n locations
  Clone ID: LIB190-027-Q1-E1-E8
cgcgtccgcccacgagtccggagatgaagcgtgcatggcactggtcatgtagcaaccgctggttcgtctattacatcgccagctggtcgtgtgattctctcttgtgaggttagctccggtatagcaaggttaaagccatcttggaatcgtccagactttaagtagattggtagttcaaatttattttgaaaaaaagtaacgctaggatggtttggctttcaccttgtcgttttttcttcttgggttgctactactgtaacgcggtgctcagggaacctagaatgaatccgaaccaaacgagcgaggttttgctatgatagagtgataagaacgttgacgtggacagacgtcttttgttccttttcgttgcaacaagtacaaaagatcgtcacaggaaaaacatcttgtcactgagtacaacgtgcatcggtgcagtgcattctacnagcacaattctattgataaactagtacaagacaacaat

SEQ ID NO: 1429 - DNA, 221 bp, Cyanidium caldarium
  Clone ID: LIB190-027-Q1-E1-E9
atttgtcataagactttcgagtctctatgaggaacatactgatcatggaactgtttgggtaactatgacccgaataggacatcgcaacgtatgtctgtttatctattcagagcctctttcttcggtgaggcgtggctggctagaaacaccctcattcggggtgtctgataggagcgacggatggcaactggaaaatatcttgttttatcgtacgttcttct

SEQ ID NO: 1430 - DNA, 276 bp, Cyanidium caldarium
  Clone ID: LIB190-027-Q1-E1-F12
tgggaatttcgtcacaacaggacggtaccggttttgcactttttaggagatcactcttcttgtctgtatgattgctttattgattgcacagcagctgattttccggagaagcctcaaagatttcgagtcgtatacaatctattatctatgacatattcatcgagaataagagtgcagacccacgtagatgaggtaactcctatagagtcagctacttgtctatttaaaggtgcaaattgggcataacgagaagtgtgggacttgtttggcgtattc

SEQ ID NO: 1431 - DNA, 492 bp, Cyanidium caldarium
  unsure at all n locations
  Clone ID: LIB190-027-Q1-E1-F5
ttacataaggcggagtttcanagaagatctagagtgtcaatctgtcncttttttataggtatagagtgacaagagggttgcgttaccaatacggcatgtctgcgcactcgtcgactcacaaaaaaagaaagactatggcaaaagaccgaatatgattcgacaaagagtaaacatccgtggaacttgtattgtagcaaccgctggttgatcgtttacatagccagctgaacatgtcttggcctcttgcgagatgcgctcncgtagaactaggttaacaagccatcttggagtcgtgtaggctttatgttgattgttaatccaaatgcaaggacggtttggattccacctccttgttttcttcttggattgctcctgctgtactgcggtgctaaaaggaacaagagtgaaagcgaaccaaaaaggcgaggtttcgctatgacagagcgaatagaaagttganatgaaaagactgcgttggttctttccgtgcac

SEQ ID NO: 1432 - DNA, 305 bp, Cyanidium caldarium
  unsure at all n locations
  Clone ID: LIB190-027-Q1-E1-F7
ccacgcgtcgacaatgcatccacggncgagtcgccggacgtgtgggatcgattgatgcggaaaacgttcgacgcgagattgtcgtcagaaagataaaggaaccttttttcacaaccagtaaatacttacatggatataacatctttcatatcatataggaacttttcctggggtacacgacagcccaactttatatctgtcgcgaagcaacgtacgaaagcaacatatctgagaacagtaaagtccaaccagttggtagaagtatcatgcatgttgaaatcgatcccttttttccaaaagctatc

SEQ ID NO: 1433 - DNA, 384 bp, Cyanidium caldarium
  Clone ID: LIB190-027-Q1-E1-F8
tcatatattagccaggagtatatggagaggataagagaagagagtagggtgtatgtaggaatgagtataataacaggaatgatatggagtaaagaagtgtggggatcatggtggataaatgatgtaaggaatataagcatgttagtatgctggatatggttggaagtaataggaggagtaaagaaggagtacagaggaataataagcagtataggaataataaatataccgataataaagtactcagtagagtggtggaataccttgcatcagccagtgagtataagctcatggggaggaagtataggaagagaagaagtagaagaaatagtgaaggtaataataatacgagtaatggtgagtatagagaagaacatgatgaag

SEQ ID NO: 1434 - DNA, 292 bp, Cyanidium caldarium
  unsure at all n locations
  Clone ID: LIB190-027-Q1-E1-G10
ttagggaggcngattttttgcctgangagtaggatgaagaggtagacgttgaggattatcctcaatcgccacctttggttcgagaatcaccggaaaccactaaaaatgcggtcaacgaacaggaatccgatgcggttgcagacgaatagattgtgcgtctacagaaacagaaggacatggagaggtttgcttccttggacgaggaataacaggaacgctatggctattatcgtatgggagatttggatatgtacagagtgaagacgctggtctcagcggtcaatcctgcctt

SEQ ID NO: 1435 - DNA, 379 bp, Cyanidium caldarium
  unsure at all n locations
  Clone ID: LIB190-027-Q1-E1-G11
gtcgggatgaagggcacaagtccggttaaacgttaccgccacaggttggtgacaccaaagcaaccagtagacagataacaagaatttttgcttgttcagaagaaacaaacataacacatgcgtgggtggttggtaaaagaacgcggttgagcttaaactgttaacctttgttcttgtgacagtataaagagtcttattcttcgtagctcggtccaaagccgagttttcctgtcacctaaaaattagacattctcagctgtctttgtcctttttcaaggtgaatatatgattacaccgaggagcttttacacgcancaagaacgacaaactggtagaatggtacttgttgaacgactgcaaactgtacagtcaaaaattc

SEQ ID NO: 1436 - DNA, 477 bp, Cyanidium caldarium
  unsure at all n locations
  Clone ID: LIB190-027-Q1-E1-G2
tatgttggcgtttacttgtctcacagactgtcgttggttagagacttctcgatttctcagatgtngcanagccaataccgtctcgttgcgacgtagttcccagtgttcacactcttggaggagtgtttcgatgaactacagtcgctattcgataactaccgacaaatcagaaggacatattgttcccggtactttttcaagatttgagtttcttgaaggtcgagtcaccggtccaaccgtcttgaaccctagcatacttgactttacagtgtctaatgtttcagatgctgcctttggagaatggagagcattatcggcttcaagtatagcanaagaactggaacacagaagaaacgtcacaaagcgacaatagaaagtctcaagaagactcctaccgaaaagtcaaggcttacattttctggacaacttgaagaattttatcgaaggaatttaaagatatttcaacgagccgggtga

SEQ ID NO: 1437 - DNA, 329 bp, Cyanidium caldarium
  Clone ID: LIB190-027-Q1-E1-G3
aagcgcaagtctcgaaagaagcctattcagaagaccaaaaagccaacgttggacagagttttcaactgtcctttttgtggacacgaaaaaacagtcgactgtactatttccaagtcaaaaggaattggttccgtttcgtgtaaagtttgtcaagcttcgtatactgcacaagtgactcacttggatgaagcagtagacgtgtacgccgaatggatagataaaactgttcaagccaatagttgacgactttgttcattgttgtgggaatattccaacaccaagtgtctgccataaaagtgagtatctttcaaagacaaaaaagacacggc

SEQ ID NO: 1438 - DNA, 506 bp, Cyanidium caldarium
  Clone ID: LIB190-027-Q1-E1-G5
ccacgcgtcgagctgaattgtttccagtgagtatggcatctataccaacgacacaaaaggcgctggaggttgttcagtttggagacccgctgaaaggagcactgaaacttaacaaagaggctccagttcccaagccaggggaaggacaagttctagtgcaaatgaaatatgcctgtctcaatccggcagacgtatttacagtccaaggaatatacccaggagtcaaaaacgtagttgaaaagaaaccaggttttgtagcaggtctcgaaggtgcagggcaagtggtagctacagggtccggttgttcattgaaagttggtgctcgagtcgtacctttgctaggagaaaaggctggttcgtggcagcaatatgttgttgtcgctgaaaagcaatgtgtgccagtgcctgacgacgtcgacgatgcaacagctgctcaactttttgtcaatcccttaacggtggtaggtatgctggatgagattcagcgcaatgctcccataaaagac

SEQ ID NO: 1439 - DNA, 523 bp, Cyanidium caldarium
  Clone ID: LIB190-027-Q1-E1-G6
gggcaaagaaaggccagttaatagatggaaaggcaattgctgctgctataagagaagaaataaaggaagaagttacaaagatagaagccgcggttggaaaagttcctggacttgctacggtacttgttgggaatagaacagactctactacttatgttcggatgaagcgaaaagcttgcgaagaagtaggaatcgagtcttttcacacggaacttccagaatctgtctctgaagaagaacttttgagttgtgtcgaaagactcaattcagatccagcggttcacgggatactcgttcagcttccactcccgaaacatattaatgaggagaaaatcctttcagccatttccattgagaaggatgtggatggctttcacccagtgaacattggaagattggcaatgaagtcgagaactccgcgcttcgttccttgtacaaccagaggctgtattgagctgctggatcgaagcaacgtcgctattgagggaaagtgtgctgtcgtgttgggaagaagcaatatcgt

SEQ ID NO: 1440 - DNA, 398 bp, Cyanidium caldarium
  unsure at all n locations
  Clone ID: LIB190-027-Q1-E1-G8
accacgcgtcgcgcaatgcagcgtangagaggaccaaataaggtgtggatagtaggaataggacagccaatagcagatggattgaagttaatgataaaagagggagtaaagccaacaagagcagagggaatgatgtataaagcagggccagtagtaacatggatgttatcgatgctaggatggagtgtagtaccaataggagaaggaaaggtaatagtggatatagaagtgggaataatagcatggatgagtataggatcattgggagtatatggagtaataatacgacgatggggaagcagttcgcagtacagcataatgggaggtttaagaagtggagcgcagatggtatcgtatgaattaagaatgggagtaatgatgatatgtataataataat

SEQ ID NO: 1441 - DNA, 398 bp, Cyanidium caldarium
  Clone ID: LIB190-027-Q1-E1-G9
gcaatcttctcaatgagtcgtattgtttctccttgtgcaagttgccacgtttcgtttatagtccaagatatcaggttttctttatttactccacgtttccaaagcaaatataaaacgttttgttttttgtgttgttgttcgaatagcaacagcgataaccacgagcaagacaacgaggcacctaggacgaacaagttgggtccaaggaaggacataagacgctgcttaataacacgtgaaaagcttcccaaagaccaactttggagaattgtacgaacacgagacgaaaatggaagatacaaagttcagctggataaaggaaaagggaacgtccgtatatatctcaaacgacatacaactaagtttacgagctcaaacccgtgtaaaactgttgaatc

SEQ ID NO: 1442 - DNA, 53 bp, Cyanidium caldarium
  Clone ID: LIB190-027-Q1-E1-H10
gctacaaagttttaacccggtatttaacaatttctcaaaatatacagaaaata

SEQ ID NO: 1443 - DNA, 400 bp, Cyanidium caldarium
  unsure at all n locations
  Clone ID: LIB190-027-Q1-E1-H12
gagaaaggataccactgagtatcatgaaacgggtggacacggtcacaccaatccccaagtaaggttcccttttcaatggggaattcgcacaagttcccatggccccttgttcccacgaaacaaatgaaatcctttgttttcaaagttcttcaagtgggtttgtacctgtggagtttcttgaggtgaaaaaagcacaaagacttgaagtaccttgaagaaacacttggacttgttgttccttattccaaggtaatccaaaggaacacaccattcggcaatccaggtatcgacgtcctttcctatccacacaaaactgctatagttttcttccgtgacataaacgttatccatgggaaaagatgtgtctatccaananaaaaaaaaaaaaaaaggcgggcgc

SEQ ID NO: 1444 - DNA, 284 bp, Cyanidium caldarium
  unsure at all n locations
  Clone ID: LIB190-027-Q1-E1-H5
ccacgcgtcggacgagcttaattcttagagatngttgctgactagcagcaggagtagtacaactgtcgcggggagatggaggagtgatcaccttatcccccacggaggcgtttctgtcatccgtaacggtctttctagcctaggaaaactgcttcgtttgttgagaagaatgtcagaaacttgtgacattgccaagtttttggctattctgtatgctgcttgtatggctcgaataacgtggtttgctttttttttactcggataaaggtttttgtttgttcttc

SEQ ID NO: 1445 - DNA, 268 bp, Cyanidium caldarium
  Clone ID: LIB190-027-Q1-E1-H6
cacgcgtcgccgacgcgtccgcccacgagtccggttggctgtttgcaattcgcttgtggcgtgtgaagttttggttaccttgaaataatgcagatatttgtaaagacacttacaggcaagactattactcctgaagttgagccttcagatactattgagaacgtcaagtccaagattcaagacaagggaaggattcctccagaccagcaacgtttgatatttgctggaaagcaactataagatggtcctactctttcagactataata

SEQ ID NO: 1446 - DNA, 452 bp, Cyanidium caldarium
  Clone ID: LIB190-027-Q1-E1-H7
ggaattccgaattgaccacgcgtgggcgacgcgtccgcggacgagtgggaattgattttgtcatgtcgtcttcaaatgagtctatcgagacgttattgctaaagacgtttcctaaagaaatccctacttcgtattgtctcgtgtatgcacttttggctattccggtactcgcgctcgacgtgtagttatatcttgccgtactccacttgaacttattgcttcaagcgtttcgttgatcatcggtactacagtcggcttggtgcttctagttacgtcgtatcataaaactgcatatgccaagtggtctaagctcgatcgcacaacagagcaaccaaccaagagctctttcaagggtaatttgtcggcataccgaagtggagttgagagtcaactatggctcctggaaagatcctcggtcagttacagtgtaatgataaacaacgcaatatttc

SEQ ID NO: 1447 - DNA, 389 bp, Cyanidium caldarium
  Clone ID: LIB190-027-Q1-E1-H9
acgcgtcggggacgcgtccgggtgagaacaatatcgatcaagtgttcattattcgtcgccatgaactttttacaaaggaaatacatcaagttactgcttgttcttaacattatttttattttctcactagtagggagtggtcttgagcacttcccaaacctagttagagagtatatgattctgaccccagaggagtacggtcaacttagccaagcagaacaagcagggtgtagacaagtcagtgtgccagttattacatcaacagtttccgctgttcaagcagtatcttcttcttactacgatgggggcatttacagtcagtcataccctcacaataagtttccaagtcctgtcctacgatcctgggcatataccattactccaacgtc

SEQ ID NO: 1448 - DNA, 568 bp, Cyanidium caldarium
  unsure at all n locations
  Clone ID: LIB190-028-Q1-E1-A10
gagtcgtataacaaatgtacctcgaaagccattgcatattttaatgagtaccaaagacttgcaacattattctcgaatattttgtattgtatttgctgtagcacatgttcgctttcaaatggagcggtgttggttcctcttgcgaaatgtattcagagaatgcaatcgagtatctctcgtcaaacacagaaatacattacaactactgaggatgtgcaatttttgtattcattgtattgaagaattcttccagattgacttgattgaagagtcctttgaaaattttatgaaacaggcaagaggagcttctgactttgataccgttcatttgttgcatagaaaatcttgatactcttgtccatcatactttgatatactctgcatccttcatggagtcgttggatagtcttttgcaggtattccgagaatattgtttatacattcaacacacatttatagaagacaaagctattgtccaagaactatctacggaaaggacacgaacattccatgattcacgagcgtaaacttccgtttcttcaagagctgcancaatatctcaatcatc

SEQ ID NO: 1449 - DNA, 491 bp, Cyanidium caldarium
  Clone ID: LIB190-028-Q1-E1-A12
gcccacgcgtccgtgttttttgcggacacttgaagacagttggaattggataaaagagacgaggggagcacatacagaagagaagctttccgaggagaattttgtctgcaatagtatgaagcaagtcgtgactgacacaatagacttgctagaaagagtagagcagagatgcatagaatgggacaaaaagacagaaaagctttcaggagaagtgaaacaagaatatttgtcgtttttggcgccttttgtgtatcagcgctttctcgtgtgtttgtttacttggaacgctctgttgattgaatgttttcattctaatttctttgtagtcgaaaccattcgagggtttgttacactgactgttggtgcccctgttttagctcttgccgctagtctttcgtttgcgcattattatcgacgcaaaagtatgccgatttttgcaaaggaagacacatttttcgagtgaaggcacaaggtttgcgaaaataaagaat

SEQ ID NO: 1450 - DNA, 435 bp, Cyanidium caldarium
  Clone ID: LIB190-028-Q1-E1-A3
acgcgtctgcccacgcgtccgcagcataccagagagggtggtgtggttgcgggagtgtggtctttttgcaagaataaagtcatcgtaaagtgcgctaagaatactgataaatgtcacgcaaccaacaagttgttgggtatgggagcacggatagaacaagcccgcaagtgatgtgtagtgaaaacagtggtgctgttgctggctccttgcgtggcgccaaccacgaagaccaagctttggtggaaacctggattcgaaaagctttctctttgttcgaccaggacggaaaacgttatgtggatagtgtagactttgcagacgatatccagcacttgtttcccaactgtaacgaacaagaagtcgaagagttgctggaagacacggacctcaacggtgttggagttgtcacttgtgacaacttttgtcgcgcaatga

SEQ ID NO: 1451 - DNA, 412 bp, Cyanidium caldarium
  unsure at all n locations
  Clone ID: LIB190-028-Q1-E1-A4
cagaatttgaactttgcagaaatcgaaaaggctattcataaattgggtgaacacgcgagattagggaaactaaccattcaagatatgcaaggcggtacttttactatttccaacggtggcgttttcggttctctcgtatccacgcctatcctcaatatgcctcaaagtgcaatattaggaatgcatgccattcagaagaggcctgtagtcgtgaatgatcagattgtcatcagacctatgatgtaccttgccctttcttaatgacatcgtctagttgacggaagggaagcggtaacctttttaagaagaatcaaaagtttggtggaagacccacgcaaaatgttactcgatattgatatttanactccgcaatatgagttttctaacgtcgccgacacttggaaaatacaat

SEQ ID NO: 1452 - DNA, 259 bp, Cyanidium caldarium
  unsure at all n locations
  Clone ID: LIB190-028-Q1-E1-A6
atcttggcattcctcacttggtgacgctgtggngatggtcgacctgactgcacaaattgaaacacacaaggtcacagtggaagtaagagcccctgaaagtggaacgatattggaagagctggctaaagctggtgatactgttgcagtacgggccgaaatcacgcgtttaacaccaggagctgtatccgaacgacgtgaaagtgaccacacgaatcggagacaccatcttctatccaacacgtatcttcaagccctgtat

SEQ ID NO: 1453 - DNA, 327 bp, Cyanidium caldarium
  Clone ID: LIB190-028-Q1-E1-A7
atctaagacaaatatttgtgtaaaagtttctcttttgtaataacattgctatggatactgtgcgtcatctgaaacaccgcataaggaatatcaattggaaaaatgtgaaacgcactgcttccatagccaaagggaaggcggtttccaaggtgaaggatttttacatgaccgactttgaaaaccgaatacgtaaagctacttctaatagaaactggagtatgggttccgtacagttggcagagattgcccagtgcagttataaccctttgttgtataaagttatgatggatatcgtgtacagtcgtttaaaggacaacggacataact

SEQ ID NO: 1454 - DNA, 238 bp, Cyanidium caldarium
  unsure at all n locations
  Clone ID: LIB190-028-Q1-E1-A8
actcatggccatgctgttggtaatgtgtgtctatagaagaacatgaggaagaaagaggcacatacgggaaagcagtaaaagaagaaagagaaaggaaaaaactgagtatcacgaagaaaagagggagtagatgaggaaagaaagatcaaggaagtaagagtaagagaacgagtaatgtgaatganagcacgaaagtatttgaagaagagagtgtaaagcgcgtaccttttgcataatg

SEQ ID NO: 1455 - DNA, 458 bp, Cyanidium caldarium
  Clone ID: LIB190-028-Q1-E1-B10
tcttttgggacatctttcaggatccacacattgtccacttgtacggaaattatgcagagtttggcattttgtttacacttgcctgtgacgcgagttgcacagttcctcaaggttaagcgtaaattgatatttggaggaaagcttcctgtttgcgcaaatagatatagattggtcttgccacaaaacacactcatgagcctggagaagggcagaaaggcaccgagtgatgaagaactacgacagaaactttcgagctttgaatatcacgttttaagggaaggaggtacagaacgtgcttttactggagaatattgggattgtcacaaacagggaatttatgagtgtcgtgcgttgggttaccccacttttccaagtcagatacaaggtacgactctggttcacgaaggccgtctttttttgccccaggtaagaccgatgcagtaactactcgcacagac

SEQ ID NO: 1456 - DNA, 457 bp, Cyanidium caldarium
  unsure at all n locations
  Clone ID: LIB190-028-Q1-E1-B11
tacaacactcgatcgtgagtcgtatagagaacanaactgtcaaacttgtgagtagtgataatgaagtttttgaagtagacacaagcattgtatccctttctgaaacaataaaaaacgtcttggaagacacggaggatacagagagcattcccttgcctaatgtggaaggacgaattcttgcaaaggttatcgagtattgtagatatcactcactcttaaagaccattccgcagtctgaggaggatattgagcgctgggatagggaattcctaaatgtagatcaaccaaccctttttcatttgattctggctgcaaactatttggatatcaagagcttgttggatttaacttgtaaacgagtagcagatattatcaaaggcaagaagccggaagaaataagaaaagagtttaatattgtaaatgattttactcccgaagaagaagaagaagtacggag

SEQ ID NO: 1457 - DNA, 524 bp, Cyanidium caldarium
  Clone ID: LIB190-028-Q1-E1-B12
ccatggcgaaaggtagactacaggatcgtcttgagaagcttctgccttataatcagacctggtatttttatataaccaagatagtattttacgtatgcacttttattttctctgtcgtcattgctgctctggtcagtaacgcagagtttaatatatttgataaatccccaccgaatattcatggagacttttgtgcatacaaggcgtcactagctgagccagctggcgtgactgccatttgcaagtacctcatagcagtaggtgctcttggccttgtgtttgctatagggtttgttgcattctctctatggacccttttggcacatcgagtgattgatttatggtgggtcgaagccttgttgaataccttttggatggtctggtggtttatagcagctggagttgctactgcagccaggccttcaaccggtattcttgatgcggccaatgatcgttcagctatcaatgcagttgaagctgttgcctgggtcaacgcagtgttgtatctcttcaacgtatttctc

SEQ ID NO: 1458 - DNA, 466 bp, Cyanidium caldarium
  unsure at all n locations
  Clone ID: LIB190-028-Q1-E1-B3
tggtaagcanacatgggagcctacaagtatatgcaagaattgtggagaaaaaagcaatctgacgttatgcgctttttactccgcgtccgtgcttgggaatatcgacacttgccttcggttcaccgagcttctcgtcgcactcgtcacgacaaggcaagaatgcttggctacaaagcaaagcaaggttatgtaatctacagagtgagagtccgtagaggtggtacgaagagaccagttccaaagggtatccaatatggcagacctaagaatcagggtatcacacaactaaaattcaggagaaataagagatcagttgcagaagagcgagctggaagaaggtgcggaaacttgagagtcctagactcttattggatcaatcaagacggtatttacaaatattatgaagtgatactcgtcgatcctactcacaaggctattcgaagagatccaaaatacactggatatg

SEQ ID NO: 1459 - DNA, 422 bp, Cyanidium caldarium
  Clone ID: LIB190-028-Q1-E1-B4
tcgctttttatgaaagcgttacacgacaaagcagagaaggagtctatcatatacgcctctatacgctccagcggtttccatggtacatgacactattcctccagcttcagacgcgaatcaagacagctaacttgatagtcgttccgctttggtcgatttttttgagagcgcagaggttcccgatcagaccgctcagaaaaatggtatacgatatagacaagtacgatttgcagacaagaccaactttgcggaacaattcacgcaaagtttggaagagaaattgcagtcctctcaagtttggattgaccagcttcaagaggaaaatcgacgactgacagaaaagttggtcataatgacagatcaacaggaaatgaaagatgaagttgagctcatgacgttggaaaacagtgaacttggtgctg

SEQ ID NO: 1460 - DNA, 293 bp, Cyanidium caldarium
  unsure at all n locations
  Clone ID: LIB190-028-Q1-E1-B5
attaccgagaaggataactattgccggaaggaattctttattttatccgagaaggcaacgagtagaaaatcaacanaacgaagcacaacagaacggcacggtggagcaagcaaaggctgttactcaaagctcatcaaactgtacagacgccattccagaaagagaagtcacngacaaggaaaatcaaagtctcatctcacctaactggtaggagtcacgttccatgaaacccagccacaagatcatcaagatgaacaattcaattcgggactaaagtatgacaacaaagctgc

SEQ ID NO: 1461 - DNA, 378 bp, Cyanidium caldarium
  Clone ID: LIB190-028-Q1-E1-B9
atttgcaaccgaagttgctggagtaccggatttgggaacgacgggacgtggaagagatacagaaataaatacttatgttgaaaaagtatttcgttcagaactttcaggaaatgtgattgacttgtgtcctgtgggtgcgttgacttgtaaagaatatgttttttcctcttgtgaaaatcaataaaaccaactagcatttgttacaagccttggaaaaaaaaaaacaacaaaaagaagaacaaaaaacgacgacaaaagaactagcacatagcagaagaaaagaagaagcgaacatctgaaggtaacggagagtaggtgctaatggaaactgtccaccatccaatgaaaaaggggggggccccccaaggggttaacgtt

SEQ ID NO: 1462 - DNA, 556 bp, Cyanidium caldarium
  Clone ID: LIB190-028-Q1-E1-C10
ctaccaactgtttagctcctttgactaaagttatcaatgataaatatggaatcctggaaggtttgatgacgaccgttcatgcaactactgccacccaaaagacagtagatggaccttctcacaaggattggagaggaggaagaggaattttgaataacattattccatcttctactggagcagccaaggctgttggtaaagttattcctgaactgaatggcaagttgacgggtatggctttccgtgttccttgtccggatgtttctgtcgtcgatgtcacttttcgtttaaagacaccaaccacttatgacgatatcaaggcaacgatgaaagctgcgtcagaaagcaaagctttaaagggaatattggcatataccgaagatatggtagtttctactgactttgttcacaatagtcattcttcgatatttgatgcgaatgctggaattatgttgtcggaaacttttgtgaacctgattgcttggtatgataatgattgcggctactccaatcgtgttgtacatttggtgcaacatatggcgacagttgatggtgt

SEQ ID NO: 1463 - DNA, 488 bp, Cyanidium caldarium
  Clone ID: LIB190-028-Q1-E1-C11
tatcatgacatatagtgagaaacctgattatgagaagtgtgtcgctatcgttgcgaatgctgcactgagacagatggtcgcacctggtttgttagttgttgttgtccctctttttgtagggttccttgctgcatggattggaagagtctcaggaaaatcattgttgggagtacaagtttctgcaggcatattaatggttggaacgatcgctggtattctgatggcacttttcttgaataatagcggcggtgcatgggacaatgccaagaagtatattgaaacaggtgcatatggtggaaaaggttccgaggctcataaagctagtgttactggagatactgtgggtgatccttttaaagatactgcaaggccttccttacatgtcttggttaaattactatccaccctcacactggtgtttggtccgctgttcttgacttcggcgggaataaaagtcatttctggctaaagggcattaccctacatat

SEQ ID NO: 1464 - DNA, 558 bp, Cyanidium caldarium
  unsure at all n locations
  Clone ID: LIB190-028-Q1-E1-C12
ttcatattcctttgaacaacttgggaatgacgcaagctcgtttccaagtctgcaattcgagtctttcagaatatggcgtgatgggttttgagttgggatactccttggaaagtcctaatattctagtgatatgggaagctcagtttggagattttagtaacggtgctcaagttatcattgatacctttttagccgcaggagaaaggaaatggagacgtcaatctggacttacgctattcttacctcatggaatggaaggtcagggtccagaacattcttccgcacgattggaaaggtttttgcaattatgtgacgatgatcctgatgtaatacctgaaatgcatactgatcgaactcgacaaattcagttgtgcaatatgcaagttgccaattgttcgacacctgcaaatttctttcatatacttcgtcgtcaaatacacagagagtttcgcagacctttggtattgatgactccganatcgttattgcgacatcctttgtgtaagagcgatttggcagactttcttcgaacaagttgtttcaaagagtcatatcgga

SEQ ID NO: 1465 - DNA, 488 bp, Cyanidium caldarium
  Clone ID: LIB190-028-Q1-E1-C3
aatccgaaaggagtataagaaaagagagagaagaaagaaaagaagagaaaagccgtactgaagaccgacacaggtactctaggagaaaggagacccaaattaaggtgagagaatggacgataaggaactaggcaaaaggatatggtatctgcggtagaacatatgaaagaagcagcaccgactgtttagcataaacacagcactctgcagaaaagagaaaatgtaaagtatagagtgtgcggcctgccaaatagtagagaagaaatcgatgaaagtgaaagcgagtaaaagatgaggtatagagaatggcggtcctaacggtaaggatccaaaggtagcgaagtaaatagacgtttgaaaggcgtccagtatgaaaggagaaacgagtgtagcactgtctagtcgtccaactcagcgaaacagcaataactgtgaaaatgcagtaaactagcagtacgacggaaagaacccataattcttgactagat

SEQ ID NO: 1466 - DNA, 131 bp, Cyanidium caldarium
  Clone ID: LIB190-028-Q1-E1-C6
tgattggaacggctctggttgtcacaccaacttttctacaaagccgatgagagaagatggcggttacaagaagtatattttgccacgtgatggaaaagttaaggcaaaacataagggacacatcaatgcat

SEQ ID NO: 1467 - DNA, 434 bp, Cyanidium caldarium
  unsure at all n locations
  Clone ID: LIB190-028-Q1-E1-C9
gagtcgtatagacaacngttcacagcngcgagtgtaccagctcgttgcggactgctgttggatcttcttcttgtatgtttgccagcgtccagcggcaagcagttgacatcagattgctgtagaagttcatgtccgtagggagtgtatgagacttagtgcggcttgcatgacacattgaggttggtatatagccatttgagaagctgtatcagtgggacaaggtccactttgtcgtcagctactttcttgtccagatatcttgtcacagtaacagacattttaaggagcacactgttttccgacagtcataatcattcgatgaaagcatcgtgattgactatttttagggaaacggtgaatcttcatacaggagacacttcgctgattgaatttgtgtccactgttgtatttcgcacggtcatcagaacagcttg

SEQ ID NO: 1468 - DNA, 287 bp, Cyanidium caldarium
  Clone ID: LIB190-028-Q1-E1-D10
cggtggaaataggaaacttttcaaccagaaatcctctagactgagattcctgaacaaataaatcaattccagcacgactttcaccaaggacttcatagaaaaccccgtttggtttcaagaaaaactcaatggtattcagtaacggcaccacatgaaaatcacagtaagtgagttcacttcctaaaacaaggataaaagaaacaagttttctgatataaaaaaaaaaaaaaaaaaaaaaaaaaaaaaaaaaaaaaaaagaaagaaaaacaacaagaaagaaacaaaca

SEQ ID NO: 1469 - DNA, 71 bp, Cyanidium caldarium
  unsure at all n locations
  Clone ID: LIB190-028-Q1-E1-D11
gagtcgtataacatagncntgctgttggtntgtgtgtcttngnngnntctttgtgggnttcgggggccctt

SEQ ID NO: 1470 - DNA, 577 bp, Cyanidium caldarium
  Clone ID: LIB190-028-Q1-E1-D12
cacttgggtgcacgaggtgctccgaaaaacaagtggtgggaatattgtttggaagactccttgacgctcattgcaaggttgcctcaagtcgcagccattgtgtatagaaatacttattaccagggaaagcaactggaagcagacttgaaactagatatgtctgcaaggttgacaaagatgatgggttttgagaatcccgagtttgatgagttgatgagactttatttgactattcatgccgatcacgaaggtggaaatgtttcagctcattccgttcgtctcgttggttccgcactttcagatcctttcttgtctttttctgcaggaatgaacggtctagctggacctctacacggtttagccaatcaaaatgtacttacgtggttactgcaagtaaaggaaaagttgggtggtcaagctcccacaaaggaaaacctaacaaagatttgttgggatactctcaactcaggcaatgtgaatcctgcctttggacatgcagttttgagaagaaccgatcctcgttacatgtgccaacgagagtttgctttgaaacatcttccgagtgatgaaattttcc

SEQ ID NO: 1471 - DNA, 420 bp, Cyanidium caldarium
  Clone ID: LIB190-028-Q1-E1-D4
ctctcgtgcgatgatgaaaacactcctaattcgtcagtgaatacacagaagcagaacacttttaacagagctcaattttttacagctgttttcactcaactttctaactattctacgatttgataaaattgctgcagtaacagaaacaagtgctgtggaaaagaatgcgctcacggaaaccatttcggagggtctgtcgaagattctaacgagaaaaggatggaaccactgtgaaagcaccacgaacgatactaaaccaaaaccatagtcttctacaggtatgaagcacgctgaacctctatcggaagacgatgaacacactgctgaagctttgattgacaagttacaagcgcggcagcaacctgaacaaaagcgttgattcacgatcgtgtgtctgtgctttctggaaaataacttgtt

SEQ ID NO: 1472 - DNA, 540 bp, Cyanidium caldarium
  unsure at all n locations
  Clone ID: LIB190-028-Q1-E1-D9
gactgctctgagttgcctctttctctctttccttatcgctgccgcagttgcagccgacgtagtttcagaggagagatggggatatgctcagcaaacccaacaacagcaacagtgccaacaagtatgtaaacagtatgcatactatcagagtccagtctgcacttccgtaaccacacagagcccatactggacccaatgctcgaagactgtgcaaacctttgtcccaagccagtgcagtacttatacccaatctcctacatggacctattgcagcacctacaccaccactagcgtaccatctcaatgcagcaaggccgtgactacctatactcaaacctgctgtgcttatgcncaacaaacttcctatgcagtcagtaccgagcaatatgttcaggaaactgtatctgctcaatatacttcttactacggcgaatcatcctccagctattattaccgagcagctgctcctcagagatggtatgacgaacaatgcacctcatactgctgggttccagtacagacctatgaaacttatcaatg

SEQ ID NO: 1473 - DNA, 265 bp, Cyanidium caldarium
  Clone ID: LIB190-028-Q1-E1-E1
actgaccagtagatcagagagtacacatgcaagtaggtaaagcgaacgggtgactaaagaggtgtgaaagagtggaagatcatgaaagcacagaataatgtaagaaatggttagagtaaaaaccatacaggaagtaaaagcgggaatctgacaggaggaaagccacattggcactgagaaaatgtccagacaagagaagtcagcactggggaacattgggcaatgtacagggaagtatgactcactcatgaggagtggagtaaac

SEQ ID NO: 1474 - DNA, 121 bp, Cyanidium caldarium
  Clone ID: LIB190-028-Q1-E1-E11
ggccgccctttgttgttgttttttgttcttttttttcttttttgttgcgtctttttgtttttttttttgttttgttttgctttctggcgttgttccgtctctttttgtcgggtttcggccc

SEQ ID NO: 1475 - DNA, 435 bp, Cyanidium caldarium
  Clone ID: LIB190-028-Q1-E1-E12
gagtcgtataaaacaactgtgcgtgtgaaccctaacaatcccatttctctttctagtgtcaaaactgcatcgctacaattgcattttgtttgtttgaatgacgtgataactttatcttttctgtaccgaccacttgaattttcattggtgaagaaatgtcgaaagccacagttgagacgtgcccaaggcttcactgtatatcacgcaacgagcattgtcgttgtattggcattatgtattgcagctttcagtggatatttgttttatcgacgcacgaaacgacagtcaagactctctacgacaaagggagactacaggcctcttcgactgaacatgaataattttaactaggcaagaatgcggtttattcatttgttcctgtatttgttggatattcttcactcaaacactctatataaaattctctttttgttg

SEQ ID NO: 1476 - DNA, 325 bp, Cyanidium caldarium
  Clone ID: LIB190-028-Q1-E1-E3
gcggacgcgtgggaaagaggcacatacgggaaagcagtacaagaagaaagagaaaggaaaaaactgagtatcaggaagaaaagagggagtagatgacgaaagaaagatcaaggaagtaagagtaagagaacgagtaatgtgaatgaaagcacgaaagtatttgaagaagagagtgtaaagcgcgtaccttttgcataatgtctcagcgagtgacagaggaagcaaaacgaaagacaacgaagtagccaggtaagacccgaagctagttgatcttatgctgtccacgcgaagtaaggctgaaccagtatctgtggaaaaagatttg

SEQ ID NO: 1477 - DNA, 281 bp, Cyanidium caldarium
  Clone ID: LIB190-028-Q1-E1-E5
cggacgaatgggcagacgcgtgggatcaggaagaaaagagggagtagatgaggaaagaaagatcaaggaagtaagagtaagagaaggagtaatgtgaatgaaagcaggaaagtatttgaagaagagagtgtaaagcgcgtaccttttgcagagtgtcgcagcgagtgaaagaggaagcacaaagaaagaaaaagaagtagccaggtaagacgcgaagctagttgatcttatgctgtccaagcgaagtaaggctgaaccagtatctgtggaaaaagatttgg

SEQ ID NO: 1478 - DNA, 93 bp, Cyanidium caldarium
  Clone ID: LIB190-028-Q1-E1-E6
cttgttatcaaatttcatgctgtcaggaataaaagtcttagtccagtaaaagcttgccgaatcgtcatcctttctactcttgtcgttctgtaa

SEQ ID NO: 1479 - DNA, 129 bp, Cyanidium caldarium
  Clone ID: LIB190-028-Q1-E1-E7
gcattctttgtcttagcactatgcgccgttgcaattcaagcttctcctctagaggacactttgggtgccttaatgcggggtggttatcaatcgcaaagccaagcaccaaaacctagctgttgcaagttg

SEQ ID NO: 1480 - DNA, 365 bp, Cyanidium caldarium
  Clone ID: LIB190-028-Q1-E1-E8
tgggcattgtgggactgaagcgaccttctatgtgtatggtgcgcttcaatacgaagattcaattaatcgacggctttcatggttaacttgctttacgcattcctttgtgggtagcagagttgacggttgttggtggagatacgacagcagtccggaaacagatacaggtcgaacaatgttgagtttcttgaaagtacaaatgtcgtgtccatgaagttgtctaattgcgtgagaaaagacaatgttgtgttatgaagtttcgtaaatacttcatgtgtgttgtgttgttttgccacagaaacgatgtttcgtccttggtggcgtttgcattgtccaataaatgacaccatttgtgtatacaaaac

SEQ ID NO: 1481 - DNA, 427 bp, Cyanidium caldarium
  unsure at all n locations
  Clone ID: LIB190-028-Q1-E1-F1
tcgttganatataatgtcctttcttttcttttccacataggtctaaccaaaagtcacggaaaaacattttgaagcagacctgtcgaattttccaagcccactagtctatagtgagacaagtttatcattcttcgtggcgtccttactatcgaggatgagttgctttgaattgcaacgttctttctcctcagaacttgaaccggagcagactgttggtccagaacaggacacgacagtcattccttangaaatatgcttcagaacaatctataagatggcgactcatctaggccctctgtattttgccacaagagtgtttgacgagattgaatgggaacaaagttctattcacatagttgctgcactttggtggcacncaagcacagggacacagaacacgaaattttgctanttcagaaacaagaat

SEQ ID NO: 1482 - DNA, 368 bp, Cyanidium caldarium
  Clone ID: LIB190-028-Q1-E1-F10
gcgtttcaggcagtcaaatacctatgataggttttggtacctggaaagcggaacctggtgttgttggacaagcagttgattgtgcaattcagactggatatcgccacatcgactgtgcagcagcttattgtaacgaggaagagattggaaaagtgtttcaaaaggtcttttctagtggaaaatgtaaaagagaggagttgtttgtcacttccaagttatggaatacttgtcacaagaaggagcacgtgattgctgcttgtaagcagactttaagtgacttgggactagaatatctggatttgtatctcacgcattggcccatagcttttgaatatacgggacttcccataacaggagataatgcgatg

SEQ ID NO: 1483 - DNA, 508 bp, Cyanidium caldarium
  Clone ID: LIB190-028-Q1-E1-F2
gcgtggctaccaacgaaatgcttcgaggagctggaagcaagctttgatccggaggtacccgaatgaggcaactctttatactgtctactgaatatataggtaggcttagaagcagcaaaccagagaggaaagcgttaaagcatgaaagaaaagaaatccgaaaaagaagagaaaaaggtaagaaagaggaccgaatcagggtaagaggtagaggagcaagaagagaagagagaatgctgggtggagtagcgaaacaagagaagggaagtaaaaggtaagaaagaggaaaggtttacgagagaaggaagtagaaagaagagagtgtaaggcggcgtcataatagaaatccgaaaggagtagaagaaaagagagagaagaaagaacagaagagaaaagccgtactgaagaacgacacaggtactcgaggagaaaggagacccacataacgtgagagaatggacgataacgaactacgcaaaaggatatggtatctgcggtagaacatatg

SEQ ID NO: 1484 - DNA, 364 bp, Cyanidium caldarium
  unsure at all n locations
  Clone ID: LIB190-028-Q1-E1-F3
ttcgtgtcttactccgtacctgcaagaaacttaccggctttggcacgtaacttttccaatgtctgtctctcgatgagtggtctgagagggggatgtttacgaaatgtgaaagttttcaaccacaaacgacctgcaaggttgttatctacgacaatgacaggaggcgaccatgaaaggagagaacttagtcgtcctatgcgtacgcttgattccgctttcgacgaacttttagcttttgcgcaagatccctggtcaatgtntcgctctccatggagtctgtcgcccataagtatggcagtagacacgtggatgcctcgtgttgacttggtggagaacgaagatggcttttatgcatacgtggaac

SEQ ID NO: 1485 - DNA, 277 bp, Cyanidium caldarium
  unsure at all n locations
  Clone ID: LIB190-028-Q1-E1-F5
aacgcgtccngccacgcgtccgctcctgtaagcgttcgaatagcgacagtggaacgctctactgttgttttctttgattgttgcagctatcgttgcactaccgtggcatcgctttctanctcttgagattcattttggagcagtggagattggctgcttgattgtgtgggattgtaaaagacggacgttacttgtatgtccaacaacancaacaacaacaagtcttcttcttctaaagaggactgtgggtcattgtggaaaaccttttcacgatgtg

SEQ ID NO: 1486 - DNA, 371 bp, Cyanidium caldarium
  Clone ID: LIB190-028-Q1-E1-F6
gagaggagttcatcatgataaagcccgacggagtacacagacaactgatcggagagatcatctctcggtttgaacgccttggctacagtttagccgccgcacaaatgatgactccttcggtacaacttgcaagcagactatgagacacgacggaaacattctttgcaacattggtgaactttttgacctcgggtcctgtgtttgcactggtttgggaaggaaaacatattgttgccacatgcagaaagatgattggaaaaaccaagccgcttgattcagaaccaggaacgatcagaggagactttggactggacgttggcagaaatattactcatggaagtgactccgttgatactgctaatccgtgaatc

SEQ ID NO: 1487 - DNA, 494 bp, Cyanidium caldarium
  unsure at all n locations
  Clone ID: LIB190-028-Q1-E1-F9
tgagtcgtataaacacaggagtatttactgctgcagataaagctcgagcacatatgaagggaggtgctaagaaagtaatcatttctgctccgtccaacgacgctcccatgtttgtgatgggcgtcaatgaagacaaatatacaccggagaatactattgtatccaatgcatcctgtactaccaactgtctagctcctttgactaaagttatcaatgataaatatggaatcctggaaggtttgatgacgaccgttcatgcaactactgccacccaaaagacagtagatggaccttctcacaaggattggagaggaggaagaggaattttgaataacattattccatcttctactggagcaagccaagctgttggtaaagttattcctgaactgaatggcaagttgacgggtatggctttccgtgttccctgtccggatgtttctgtcgtcgatgtcactttccgtttaaggacacaanccacttatgacgatatc

SEQ ID NO: 1488 - DNA, 542 bp, Cyanidium caldarium
  Clone ID: LIB190-028-Q1-E1-G10
gagtcgtatatacaaaaataagctctatgttgcatatggacttacggagtcaacagctccttgcactgccgttcctcatggagccgaagccccggtagatcccaattatggcgccttgtccatcggagttccgacgtgcaatgtcgattgtcgaggttgtttctgcagagacaggaaaggaggtgcctcctggaacgcctggagagttgttgattaaaggacctcaagttgtctcgggttattggaataaaccagaagaaacatcaaaagcgataaagaatggttggctgcatactggagatgtcgcaattatagattccagaggttatttgtatattgtggaccgaatcaaagatatgatcattgcttctggatataaagtgtatcctcgggaagtcgaagatgttctttatgaacacaaggccgtaaaggaagctgccgttatatgtgtgcctgacccatatcgaggagagactgtcaaggcttttgttgctctcaacgatggaaccagagtttcggcacaagaactcatagaattttgc

SEQ ID NO: 1489 - DNA, 418 bp, Cyanidium caldarium
  Clone ID: LIB190-028-Q1-E1-G12
aatgtcgtcagaggaggaacaagtggaaacctctacttttgaactttcgagagaagccgaggaagcagcgataaaagcaagaaacttaagggaaaggattgaaaagtttttctcgaagagttaccagagcgagaggagagataccgaagaagtgtcttcagacaacgatggagtgactaccttcgatgagtcctattgtttaagagaccaacataacttgttagaagctatagaacagttagaaggtgctgcaagagctttggaagaagtttctttggagtcttcaaactatacgcagcaacatcttgaagaaccaaaatatgttgccaagcccgctgtgcatttagaggaatctgtaaagagccagtctacaacataagaaagtgtgacgagtttggagatatctgactatgattgg

SEQ ID NO: 1490 - DNA, 345 bp, Cyanidium caldarium
  Clone ID: LIB190-028-Q1-E1-G9
ggtgtggctagtttgaataggacagccaatagcagatgggttgacgttaatgataaaagagggagtaaagccaacaagagcagagggaatgatgtataaagcagggccagtagtaacatggatgttatcggggctacgatggagtgtagtaccaataggagacggaaaggtggtagtggatatagaagtgggaataatagcatggatgagtataggatcattgggagtatatggagtagtagtacgacgatggggaagcagttcgcagtacagcatagtgggaggtttaggaacgtgagcgcacatggtatcgtgctaattaggaatgggactactgatgctatg

SEQ ID NO: 1491 - DNA, 460 bp, Cyanidium caldarium
  unsure at all n locations
  Clone ID: LIB190-028-Q1-E1-H10
cgcgtccgcaancatcaagtggatcatcccacgttggtaaagatagacttgtctcaaggcagctttaaagtactccaagactgtgacagagatttagaatgtgatcataataccaagtttcagttggaacttattcagtatggtctcttttcacctggtttttggacgagagaaaatgttctgctcttctatttggagctcgtgtcaggtgtattcataagggacactctctaccttttctacaacaaaggtgaagaacatttgtttgcgagtttaatgctgttgttggagacacaagtttcactgtatgcagacataaaaacaaactgggagaaacgacactttatcgtttgcctcatcgtcaggtctttgtgtgaggaatatcaacgacagtattcagagctatgttcaccgaatgaaagcacganagatatgctactagtaaacagaatgtatcaaa

SEQ ID NO: 1492 - DNA, 496 bp, Cyanidium caldarium
  Clone ID: LIB190-028-Q1-E1-H11
ccacgcgtcgcacgcgaatcatatttcagaaactttccaagcaaaaagctgcgaaaccacgtcgcatactttcgccaacgtaggcaagagatgaaagtcttcagcaagcactaggtcagatatccacgtttcgaatttaccagtatcggataacaatagtttggtttctaatagctgcacacgctcttggagtttctgaaccttgtgcattatttcttcaagtgttcggactttggaacgagttggcactactgctttctctccattggataccagttgaagaagcatattcagatgttcattgagttttttccgacttctttttgttgcaagattatgttttgctcgtctcgtatctgtgaaggaagcttgttgggacaacatcaacggaaatggaagaaagaatccgttggtaattcaactgatttttggatggacgacagcacatttgaaagcagttgctctgtaatatttgtctttgagctagaagaaaaca

SEQ ID NO: 1493 - DNA, 513 bp, Cyanidium caldarium
  unsure at all n locations
  Clone ID: LIB190-028-Q1-E1-H4
ggcacgacagaccgtcagctaagaagatatactcttatgtaagagaatcaaaatccagagaatatttggagctaaacgattcgttgcagcagccagtggattcatcttgtcncgacaagtggctgtttattgcaaccccactgttggaagttgcttgtactgatgggcagcgaattgacatgattcctttgaacaaagatataaaggaattgtttttctctactttaaagaagaactttgagtcgaacgaagcgtcatgggagtgcactgtagttgacaccgcagttgctgtttttatccagtattatgaacagtgcgtggaacagtactatctagcaagcaaagattatgagctacctggttattccaaagtaaaacagattcggcgtatgattgaagatgttctacaaatagagaaggaacttgcgaatatgcgtcagacccttgttggcgttcggagtcgtctttgtacctttgaagctgcatcacgcagcgaaactcgtgtgcaatggt

SEQ ID NO: 1494 - DNA, 107 bp, Cyanidium caldarium
  Clone ID: LIB190-028-Q1-E1-H5
gatcagagagtaacacatgcaagtaggtaaagcgaacgggtgagtaaagaggtgtgaaagagtggaagaacatgaaagcacagaagaatgtaagaaatggttagagt

SEQ ID NO: 1495 - DNA, 282 bp, Cyanidium caldarium
  Clone ID: LIB190-028-Q1-E1-H7
tttgcgaatctcattcctggtcacggtggagtaacggatcgaatggattgccaattgttgatgggtttatttacttatgtctatttgatcaattttgtgcttcgaaatactcctgatgttggtaatttgatgagtttagtgttggagttgagtactgcgggacagctggaacttttacaggaactttatcaactcttacgtgagaaatccatacaagcggatgtattgcagcaggtgatgaatgaatcgagtacttagatagtctcaacggcgtgatgtgta

SEQ ID NO: 1496 - DNA, 223 bp, Cyanidium caldarium
  unsure at all n locations
  Clone ID: LIB190-028-Q1-E1-H8
gtccgnccacgcgtccgaaacaagttcatttgtccttgtcatggttctcagtatgatagaactggcaaagtagtgcgcggtcctgctcncctttcattggctttagctcacgtagatgaagacgaagatggaaatattcttttcaaaccgtggaaagaaacagattttagaaccactagcgatccttgggggaaataataacacttggggttcttcgtgacac

SEQ ID NO: 1497 - DNA, 552 bp, Cyanidium caldarium
  Clone ID: LIB190-028-Q1-E1-H9
ggaagcaatgtggccgatggtgctttcccatacgagaagactgcttccaagaggcttttatcatactggaatattaaaacagacaaaatttatcaaccaagaacagtcctcaaccacctctagtatacctagtgccgaggacactcctctccatatcgacgaaagctgtgtccagcgcttgagatatgttagtagccaaaggggaggaaaacctgttgctttaagagtagcagtggatagtggaggatgttcaggctttcaatatacttttgagttgaccgaggaaaagccagcagagaacgaaaccgtggtggaaagaaacggttgcaaagtatatgtggacgatatttctctcccgcttttaaagggaagtacggttgcttttgtggaagaattgatgagtagttctttccgagtgctgaacaaccctggttcggaaggaggatgtagttgtggaacgtcgttttctccgaaaatgtcatgatggtaccatttgggtgtgtgtgtgtatgtatgcgatagaatatatatgaggcaagaacgaagaaactg

SEQ ID NO: 1498 - DNA, 532 bp, Cyanidium caldarium
  Clone ID: LIB190-029-Q1-E1-A1
cggaattccggaatcaccacgcgtcggcggacgcgtgggatgatacacgcatcatcgttgcacaagtggatgcagataaagacaaagtattatctcaacagtttgaaatccaaggttatcctactatcaagttgttattacctcgttccaaaagtggaaagaagaatgtctccgatgcggtagtggaatacactggggaacgtactgctgctggtctcgtcgcgtttcttcaaaaccataccaacatttccatcgcattggcaccggtagaaagttttgtggtggagttgaccgatgagaatttcgatcgagtcgtattggatccgtatagtcatgtgttggtagaattttatgctccttggtgtagtcattgtaagatgttgagaccgcagtacgaaaaagttgcaaagacttatcgccatgtgaaaggactggtgaatgcagctatcgatgccgataaatgtggaaagattgcagaaaagtatcgaatcactgggtttcctacattgaaataattttcagctgggaaaga

SEQ ID NO: 1499 - DNA, 426 bp, Cyanidium caldarium
  Clone ID: LIB190-029-Q1-E1-A11
aggaggattctgcagtaaacataaagaaatggctagcaagtttcgaatcctcccctttggtgatcacgtcttatgaaatagtaagtttagtacattcacattcctattcttgttgaactgttggaaagattcgtagtgatgtagaatattttcaacgatatcattggagttatttggttttggacgaaggacacgttattcgaaatcatcattccaaaaccgcaatagccgtaagaagcctcacagcagagcatagacttatattatctggtactccagtacaaaattcagtcaaggatttgtggtctctttttgactttttgattcctggttttttgggcgatgaagcttcctttcaagaacgcttcgtacgacctatactcaagggaaagagtttatcggcggaacaaaaggacagagaacaag

SEQ ID NO: 1500 - DNA, 411 bp, Cyanidium caldarium
  Clone ID: LIB190-029-Q1-E1-A2
ggatgagtaccgcaacatcgttgcacaagtggatgcagatactgacaaggtattatctcaacagtttgaaatccaatgttatcctactatcaagttgttattacctcgttccaaaagtggaaagaagaatgtctccgatgcggtagtggaatacactggggaacgtactgctgctggtctcgtcgcgttgcttcagaaccatactaacatttccatcgcattggcaccggtagaaagttttgtggtggacttgaccgatgagaatttcgatcgagtcgtattggattcgtatactcatgtgttggtagaattttatgctccttggtgtaatcactgtcagatgttgagaccgcagtacgacaaagttgcaaagacgtatcgccatgtgacaggagtggggattgcagctat

SEQ ID NO: 1501 - DNA, 432 bp, Cyanidium caldarium
  unsure at all n locations
  Clone ID: LIB190-029-Q1-E1-A3
gccatgtacatagtagccaaacgtctaaagtccaagtatgacattcaagatgaaagacgtagcttgtatgaggcaatcaatctttggtgtagacaaggagtgggtgacaagtctttttgtggtggtgagcaacctggtttagcagatttggttatgtttggagtcttgcgttctttaaaatattatgacgtgttcgaagatattcagaccaatacggatatgcatttatggtatcatagaatgcacgctttggttggtgattcctcaatgatnacaatagaagaatgaacagcaagtcgttccttgggaaaatatggacctatattgctatcaaagtaagagaagactgttcagatgcctcgtctaattccccataaatcaatatgcaatctgtgagaataacgaaatccgtgtctaatacattccgttgct

SEQ ID NO: 1502 - DNA, 505 bp, Cyanidium caldarium
  Clone ID: LIB190-029-Q1-E1-A4
ccgggacgacaacgcgtcggactttgccaaaatttttttatacaaagtttgcttctcggcaaccaacctccttccgacaaagaatttgaagatgttttcctcgctatccagttacagtataagtgttctcatcctggcctgaacataagaagcgatagccagtgaaaaaggcagaagcaaagatacgaactaagactgaactactcgaataagatttgcactgaaagttggtcaagtttcttcgcaccaatgtttcgtcgttctactagcaaagtttgccgaggtcaaagtaagttgaaaagcacaaccacaagagtagcgggaactagtcgaaacggaagacagcttgtctttatggcttcttcttcaatttttccttttcttcttgagacagaagtcttccaaaattccctctttcctttctctcactatatctatccactaaaaaggaagaatgggctcttaacatcaacgagaacttcaccaaatccttcactacatcgac

SEQ ID NO: 1503 - DNA, 120 bp, Cyanidium caldarium
  Clone ID: LIB190-029-Q1-E1-A5
gcgggaagctgcgaggaggacagccacatctggacactgagcataggtccaaacaagataagtcagcagtggggaagattgggcaatgtacatggaagtatcacccagtaatgacgagtg

SEQ ID NO: 1504 - DNA, 292 bp, Cyanidium caldarium
  Clone ID: LIB190-029-Q1-E1-A6
cggattaccggatcaccacgcgtcggcccacgcgtccgaaaggatttggagaatattcgaggcagcagaatcgaagctggattcttccagtaagacatggagaagttcgcaaaagagtatgatgaagacatgtaacatcaggtaagtatatacaggtaagtataggttttggatttggaagaaacaaggtacttcaagtagtcttctttgttgtgtataggatagagcataacttctaaacttatttatttgacttcaattgaattataataaaacattttttgactaatcc

SEQ ID NO: 1505 - DNA, 592 bp, Cyanidium caldarium
  Clone ID: LIB190-029-Q1-E1-A7
accacgcgtgcgactaaataaggctctcgatagagatgaggaagttattttagcttatgagatgaatggagagaagctgcccagggatcatggatatcctttacgagttgttgttcctggctatgttggagctcgaagtgtgaaatggctaactcgaattatctgtaagatggagtcttccgatggatattttatgacgaaagattacaaatatctgccatctaatatggacttcaataatgtggattggagctctactcctcctatcatgaacttgtctgttcagtgtgcaatatgtgatccacttccagatacaaagttgtctccaggcccttataaaatccgaggatatgcactaacaggaaaaggagaacatattatgagagtagacgtatctattaataactccaaaaactggcaactggccactttgattcaaggagacgaagttgcaagcaaagaacttccgaaaagggtcacttctggaatgaacggatggtcgtggcgtttacgggaattggtcgtctatatgaagcgaccactggttctacagctagaacgatagattctgcctgtaatactcaacctgagc

SEQ ID NO: 1506 - DNA, 283 bp, Cyanidium caldarium
  unsure at all n locations
  Clone ID: LIB190-029-Q1-E1-A9
aattgaaaggagggtcgacgagctcagcttgaagaacaaagaacttgcgtggggttggacgttatttatgaacttggactctattgacacaggaattaatgctccttttgacccgtttgcagacgcctcacgtggagaggacgcagcagtaaccanaaatatagtgcatattcgcttgcaacaaaaaaacggccgcaagtgcttgacgaccattaaagggcttgacacaaaattggatttgaataaaattacaaaggccttcaaaaaggattttggttccaac

SEQ ID NO: 1507 - DNA, 153 bp, Cyanidium caldarium
  Clone ID: LIB190-029-Q1-E1-B1
aaaatgtataaattcgctcaaataaaaaatctaatgaacataaaaaaaaaatctgtgatacaacagaaagataaagagaaagaagttacaaagataaaacaatgtaggctcaaaaatcaagtaagaaaaaacaaaaaagcgcccaagtcacta

SEQ ID NO: 1508 - DNA, 492 bp, Cyanidium caldarium
  Clone ID: LIB190-029-Q1-E1-B2
cagtacgcgcggcattccgggatcaccacgcgtccgcggacgcgtgggggaagatgggagactcagactattcattttctcttacgacctttagtcctagtggcaagttggttcaaatagaatatgcgttgaacgctgttgctgccggtgctacttctcttgggattcgagcgaaaaatggggtcgtgatcgcgacggagaaacgtatgccgtccattcttatggaaagtcatactttagaaaagatatcttttatttcggaaactacaggaatggtgtattcgggtatgggtcctgattcaagagtattattgagaaaggctcgaaagtttgctcaaagttactatcaaacctataaagagcccataccagtcgttcaacttgtacgagaaacagctttcgttatgcaagaattcacccaatctggtggcgtaaggccttttggtgttagtttgttgatagctggttgcgatgaacaaggacgacacctgt

SEQ ID NO: 1509 - DNA, 375 bp, Cyanidium caldarium
  Clone ID: LIB190-029-Q1-E1-B5
cggatatccggtatcgaccacgcgtcgggcactattagaaactcgaataatggatgcattgactcaagtttctaagacttccgactactcgagacttgcaagtctccgtgtctatcgccaaaaacttttggatttgaaggctattgctgaccagatggatgccttgctggaagaattttttgattccgattttgtcgaaaaagctttgtttagagaggacaatgggagcaaggatattggtccttgtggtagtttggatgacctgaaatatattttcgaaccttatcttcagagtttggatttacctagactatctgtggtagttttttgacaggcactacaaatgtggaacgtggcttcatgctcggatttgac

SEQ ID NO: 1510 - DNA, 443 bp, Cyanidium caldarium
  Clone ID: LIB190-029-Q1-E1-B7
ccacgcgtgcgcacagaatacaacactcgtatgctcctacaactgtgcaatcctcctcctccactactactacgacaaccagtggtagagcctgtgctacaacaaggaatccacgtatgaatattcaacgaagaatattggaagctggaagaaggtcacttcataatgagtcgggtcctagatattcgactcgtttgaactctcggagtctccacaatacattggcaaccacaagaagaaatcgtggacggaaccatcgaaatactacaagtaataatagtgtggatggcaataatagttatcctagtggtggtgacttttggatcggtggtggttcttcctcgtcttctcgtcattctttgaatgcgtggattgattatgttgctcaagtcaatccttggttacttttatcttttcatgatggcgactttacagcggatgac

SEQ ID NO: 1511 - DNA, 285 bp, Cyanidium caldarium
  Clone ID: LIB190-029-Q1-E1-B8
cagcgggacagagaaaataaattttttaagacagaagggcttgacggatgaagagataaaggaagcgtttcacagagctggacagatatatccagaagatagtttttctggaaatgtggaacgagagaagtggaattctcctccataggcaacagcaacaccggataatttaccacagactgccgtacgagacgagagtgtctccaatcaacaggctgcgcgagcttctacgggcaaagtatcatcaaacagtgttccttcgaatccaacgacagtgacacaacc

SEQ ID NO: 1512 - DNA, 476 bp, Cyanidium caldarium
  Clone ID: LIB190-029-Q1-E1-C4
cgtcggtgtgttcgtgtgattggttggtaaaaaggcgcctattttcaaagagtccaacctattgagaaaacatgaatccggaatatgactaccttttcaagttgttgctgataggcgactctggagtgggaaagtcttgcctcttgttgcgttttgccgacgacacttacaacgagagttatatatcgacgattggagtagactttaaaattcgcacgatagaactggatggaaagaccgtcaagcttcaaatatgggataccgctggacaagaacgtttccgcactatcacttcttcatactatcgaggtgcacacggcatcattattgtgtatgacgttaccgaccaggaatcgttcaacaatgtcaagacctggttgcacgaaattgatagatatgcgaatgagagtgtgaacacacttgtggttggcaacacgaatgacttgacgacgaaaaaagggtgtagacactgcaac

SEQ ID NO: 1513 - DNA, 338 bp, Cyanidium caldarium
  unsure at all n locations
  Clone ID: LIB190-029-Q1-E1-C6
cacaacaatcacgacgctgtggaagtctgaacgaacgagagaagtggaagatgagatggctgaggtgtggctattcaccgacgcanatgttgagttgccggancataaaaaagacgctgaatgctgctattcatttctgaactanggatanaaataatgcaagtattctanaatttacancattcttgcacgacaatactgctaaggtattttactgaactcgccagacatttcttggggctgaacatcaaatactaattgaggtatgtaataagttttgctgcaaacggtgtagtcccaacagacacatttgggttatttatttcgttgtttacatt

SEQ ID NO: 1514 - DNA, 374 bp, Cyanidium caldarium
  Clone ID: LIB190-029-Q1-E1-C8
ggataccggaatcgaccacgcgtccgaccttacctctccaagaagagtgttgcacggctgtcgaaagaacgtgctgtgaagtgagagaacgtacgagaaagccaagtgaggaaaagaaggcaagtagagggcggcccgagaaaggagagggcgtaagacgtgatacagagtaggaagaaaagagaagagagctagaaaggaggtaaaagaagagtaaaaggactagaagaggtacggaattcacgaggaaggagcgtgaaggaaggaggaatcccaagtaatcgaggaagaaaaagcttcggtgaaagcgtgaacggattttgtacacactgcccgtcaagttctggaagtgtgctaggaataagcaggagaag

SEQ ID NO: 1515 - DNA, 436 bp, Cyanidium caldarium
  Clone ID: LIB190-029-Q1-E1-C9
gatacatcacctaaagaaaacaaaagagagaatatataaatgggtcgagtgagaacgaaaacagtaaaaaagtcggcccgagtgatcatcgaaaaatactattccaagctgactctggactttcaaacgaacaaaagaatatgcgatgaagtagcactcattccttccaaacgactgcgcaataagattgcaggttttgtaacgcacttgatgaaacgtatccaaaaaggacctgttcgtggaatatctcttaaactacaagaagaagagcgtgaaagaagaatggactttgttccagaagtttcagctatagatgtgggtgaagtcaagatcgatccagtgaccaaaaatatgttggaatcgttgggttataaaaatcttcctaatgtggtggtggaaactggagtagaacccaagaaatttgcaccaagagcct

SEQ ID NO: 1516 - DNA, 453 bp, Cyanidium caldarium
  Clone ID: LIB190-029-Q1-E1-D10
gtccacccacccgtccgcacacgcgaccgcccacgcgtccgtgcacaaatccacggttcgtctcgagggcttatcttggaccagcaacgtggacatcttccctgttgtcggatatgcctaactcaggacggttcaacaaagtggtgtcgaataaaatatattttccgacttgtatatgcaaggtttgcaaaaagtgtgaagacagtcacagatagtcgtcgctttcctccaataacccccacaaatacaacaagtaaataggcagttcacaacagcaagaggaataacgcagtaattctcctgttccagcacagttgaattactgctcattcttaaatacttgtacttgtattttgagacggtgttttaagcgaagctcgttacttgcgttccccttcgtcctttgcaacgtaaaatgtcccaggaatatgaaaatttccgttcatgttgctc

SEQ ID NO: 1517 - DNA, 489 bp, Cyanidium caldarium
  unsure at all n locations
  Clone ID: LIB190-029-Q1-E1-D4
gcgtccgcccttgacggttgcagagaatacatanatagcanagaagcagtagatatgaagaaactttcagaagccgcaaccagtattgccgaaggagatattctcaatgatttggttcgtcgtcaacaagcttggaatttgatgcctgttcaagcaatattttctggaatctatcctgcacaaatacttcaaggaccctttgctgacatgatacattttccttcgtggttaggcaagaattccactcgttccaaaaacaaacgtctagctttggagcttcaaatgcgaatgagtactaacatatcgggctctttcaatgcctttttgatggaatatcttccatgtctacaaaccatattatcggctcctcttgtgaatagcaaagaaggtgtttcggaagtgatagataagcttgatgcatattacctgtccaaagatgactgggacactttgatgtcgttgagtctagagaaaaatgaaatggacaaa

SEQ ID NO: 1518 - DNA, 459 bp, Cyanidium caldarium
  Clone ID: LIB190-029-Q1-E1-D5
ccacgcgtcggacataaatgccaagttcacacagctcggaccaaatcttgtgcagcttttaccaacattttgctaacttcggttgatcctttaggaacaataccaagcttctcaagggcggaaactgttatatgtgtgaaataatgtccaactcgagtatgacgaaaacctttgatggagaaacctgctttcaacggataataccaagggagctctgagtattttgaggcatcatagtagtcgagaacttcaaaacctgcttcttttaaactttggataacttgatcgaaagttgccgtgtctggcagcccatttccaacctcgactgcaaattttgcctcacgatgttccttattttgagggtcatacttatcggttacgcaccattcataccccgcgaagcagcatccatgtttaattactctataagcctctgaataaacttttgtcttttccata

SEQ ID NO: 1519 - DNA, 589 bp, Cyanidium caldarium
  unsure at all n locations
  Clone ID: LIB190-029-Q1-E1-D7
ggataccggatcgaccacgcgtcgggaggattcgaggagagagacagacagatggccaacgctggtcaagatggccttgtgcaagtcaacaaacatagaaaagtaaagagattgcaagaagataatattttgaatagagcactatcacaaccaggagatgtatttctgtgcttttgcaacatccagttgttggtgaatgcagaaagagctattataggaaatattacttgtccagaaagtatcgaattgtgtcgtctattagctggacatatagcggtttggttcgatgaacatttggatgactttcgtttggaagctatcttgggagcactattgtgtacttgttattgtgagtggaagcgttttgaaggagaattgggggtacaagaatggaatgaattggagaagatatcttccttagatacttggaagcttgtgcttggtacaagacaaagagtggataatatgttacagcgagtacacaagctgacgagcatcttgtcctttttatactcgggcgaacaaccgagagtggactatatcgttgctgaggatgaagcangttgggacaagttgtggagaggaaaac

SEQ ID NO: 1520 - DNA, 622 bp, Cyanidium caldarium
  Clone ID: LIB190-029-Q1-E1-D8
cggaattaccggatcaccacgcgtcgggctctgtgtgggtttcttcattgaattctgaaggctgccgtaacttacagcagtctttgtttatcatggagagcgagacagtgaaaaatgataagctagctaaactacaaagaatggctgtgaatgttcgaactggtgggaaaggtaccgttcgaaggaagaagaaggcagttcacaagggcacaccgacggatgataaacgactgcaaagcactttgaagcggcttggtttaaaccaaatacctggaatcgaggaggtcaatattttcaaagacaacgggcaggtgatcaactttactacccccaaagttcaagcagccatcggagcaaacacttatgtggtatcaggccaaggggaaacaaagtcccttcaggagctgcttccaaatgtactcaatcagttgggttcggacaatctagctcaaatgcgctctcttatggaaagtctcagtacaacagacgaaaagggcgaagcgacagagaatggagacaattccaaagaagacgatgatattccagagcttgtggagaacaaaacctttgaccagttggaagaggagaagaatgtgaaagaaacagatgtttctgcgagctg

SEQ ID NO: 1521 - DNA, 386 bp, Cyanidium caldarium
  Clone ID: LIB190-029-Q1-E1-D9
tccacccgcgcgtccggaaagtttatgcaaaaaaattacttttacattcgacaacaagtggatgaaatgacggaaaaagcgaaacaagctcctcttccgccggtggaagaactttatcgtgacatttatgtggaaggaattgaacatgttcgtggtactttggtgaacaatggacttggtaattacttggcataaataattcccgatagtttctctatctgatatatatatctccatgttgttgttgaatgtaaaagtaattttagtgcaagtttctgcaaaaaaaaaaaaaaaaaaaaaaaaaaaaaaaaaaaaaaacaaaacacaattttttttaacaaaaaacacaaaacacaaaaaaaaaaaaaaggggggcccccctaaag

SEQ ID NO: 1522 - DNA, 385 bp, Cyanidium caldarium
  unsure at all n locations
  Clone ID: LIB190-029-Q1-E1-E11
cacacgcgtccgatacttgcttggtcaaacatactcgaacaacttttatcgaacagggtggagatggcatcccttggttcttctgagattgttgcatatgtaaagactggtgagcccatggataagtcaggtgcttacggtattcaaggcatangcggttctcttgtaaaggtacgatgttgaggttgtttatattcattatttattttgatgaacaaccagagtgttcatggctgttatttcaatgtcatgggattgcctatgcatcatttagccaaacaactagcgcaactgtgtcaacgagaagagttttgatagtagtgacttgagccaacttttagtttcattgactagttttgatgtatcttggcattttagcgttaat

SEQ ID NO: 1523 - DNA, 549 bp, Cyanidium caldarium
  unsure at all n locations
  Clone ID: LIB190-029-Q1-E1-E2
cggacctccgggatcaccacgcgtccgcccgcgtttccagttggtttcacaagtatcggatgaagagttgccaaaagtatatgcagcttccaactcttttgttttagccacaagaggcgaagggtgggcacggcctattatggaagctatattttatgaacttccagtcattgccaccaactggagtggacataccgaatattttggggaagatacgggcttcccagttagagtagaacgtcttgaaaagtattctggaaacgacccagaaatgaaaccttatgtaggattacatttggcagttccttctatttctgactttaggttgaaaatgagacaagttatgttagatgtagatactgttcgttctcgagtactcaaagcaaaacgagttataatgaataggtacaatcctgaagttgttggggatgaaatattgaatcagtttattcgaattaagaagatgctactcgcaggttctgtgcaaaaggatcactgagcctgagacttgctanggacgaccacctctcgttgccttcatttatatat

SEQ ID NO: 1524 - DNA, 569 bp, Cyanidium caldarium
  unsure at all n locations
  Clone ID: LIB190-029-Q1-E1-E4
ccgggacgaccacgcgtcgngccacgcgtcngctcgagtcgttcctttgttagttgtgagagattggactatgacagtggcatggatcccttcaatttgttgcatatgagtctgtaacgttggaatatataaatgatagttgaccaaagttgaagttccgagcttcaaaaggattgaaaactttaaaccctgtaagttacactttggcaaactaaaactttatgctacttagcanacgaaatcctattctaagtatccacacttatgtccaccacgggtcagactctttgcggaaatcttttccgttaaagtcttgaaaacaatgtttcctcccatccacagagccaagggaagcagagagctggacctcggactacgtggctctactgtcataatgagagccataacaataacagataaacggactctctcctgcttcccaaggaacgactgtacgaaagcagctgtccattctgaaatataaccaagtaatatgggttcttcttgcgaccttgagccaatttccgatttgtaggaatccttgccttaatataaaatcatccttcttg

SEQ ID NO: 1525 - DNA, 578 bp, Cyanidium caldarium
  Clone ID: LIB190-029-Q1-E1-E7
ggaataccggaatcaccacgcgtccggacgacgaccaagatcctagagcctccttgcttatgcagccggtatctgacaaatacttgcaaaagagttcagacgaaatagttagtttgaatggagttgacgtccataaagaaattgaggaacgactagatagggctttcaactacgaacttagacttttaagtggtaatgccaacagagctttatcgttggaaatatctcgcttacttaatattccactgttggacgctgaagtcaagcgtttttcggatggagaaatattcgtttctatcaaagaaaatgttcgtggaaaagatgtattcatcatccagccaacttctcctcctgtgaatgacagtctcatggagcttttaattatgatcgacaccctgaagagagcgtctgccaaacgtatcaccgcggtcattccttatttcggatatgcgagacaggataggaaggcagctccaagggttcctattacggcgagactggttgctgacttgatatccacggctggtgcctctcgagtgttggcgttggaacttcatgctggacagatacaaggattt

SEQ ID NO: 1526 - DNA, 131 bp, Cyanidium caldarium
  Clone ID: LIB190-029-Q1-E1-E8
ggattaccggatcgaccacgcgtgcgacatgttatcatcctcataatggttcgaagttctatgtgagtctttctacgagacctcctgtttctccatctatcttctgctgcggggagtgagaacggtcaacc

SEQ ID NO: 1527 - DNA, 387 bp, Cyanidium caldarium
  Clone ID: LIB190-029-Q1-E1-F1
ggaattccgggacgaccacgcgtcggcccacgcgtctggaaattagcgtttggtttgtaagtcacgagtgtatttggcacggtgttcatctcgtccaggagaaaattcatctgtcgcgtggctaattgaattcatttagaagtagatagaatatcgcaacatgttgatttatgagaatgaattctaccgcaatcagtcttagtctcctctcatccaaaactttcgtttagaagtcacatagttgtacccgaacgaaagtgaaatcatgcttgtcctagttcgcttgtttggaataactcaagaaacaattgcaccagataaaactctctaatagaaatacccttatattgcaacagaattccaatgaacaatacacctagtgaagcg

SEQ ID NO: 1528 - DNA, 414 bp, Cyanidium caldarium
  Clone ID: LIB190-029-Q1-E1-F11
caaacgcgaccgcccacgcgtccgcttcaagtgcggtccgcagccttcctaatgtcaactgcatcaacgaaacaagaaaacgaagagccacaagaagaacagaaaaacgagcaagaagatgagaaaacaactttggaagaagactattctgttccgttcaaacctctagtaaccttggacgaagtgcaagtgacgacgggagaagaagacgaagaggtgttgtacaagaatcgagccaaactgtttcgatttgataaacaaggttcacagtggaaggagaggggtactggagacataaagatattgcaacacaaggaaaccaagaaaattcgtttgcttatgcggagagaaaaaactttgaaaatttgcctgaatcattaggtcaatcctagtattcagctggaagaaaatgtc

SEQ ID NO: 1529 - DNA, 429 bp, Cyanidium caldarium
  Clone ID: LIB190-029-Q1-E1-F12
gatttctggacctggttgtttgcatgccttggctggattggctagtgcaacagtaaattgctttccaatgattttactaagtggagctgcagaaaactcgcaaatagatcgtggtgcattccaagagtgtgatcaacttcgtgcagcagttccacatgcaaaacaagtatttcgagttgacgatatcacagattctgcgagatttctttgtcgagcatttcatgtggctcgaagtggccgtccaggaggtgtatacatcgaatttccttccaatgtacttcatcaaaaactggaacgagagaaagtggaggaattgttgtcctttagcaaagagtttatatcttctcctcggaatatgccagttccgactgcaacagtcgttcaacaaactgttcagtttctaagaaatgccgaaagacctcttgttgt

SEQ ID NO: 1530 - DNA, 454 bp, Cyanidium caldarium
  Clone ID: LIB190-029-Q1-E1-F3
cggcttccgggacgaccatgcgtcggctcagatcaagatactcctaagcagagcttctgttgctgaaacttttcttggtatagatgtggggtcctcttgcgtcggtttagccattgcacaacatggaagtagggtagcttttccgttgtcttggtttaaacggacggggccggttggtgacgcaagaactgttcgtcagatttttattgacaacggtgttcaagtttgtgtttttgggtatcccctcacactttctggtggtgaaggcgaaaattgccgtaacgttgcactgtttgtgaaaggtttgcaggaaaacggtgcgttttttaacacgcaagttcatagctgtttattctgggacgaaagattctctacgcaagtggcaaagcgagttgttttacggagtaagacgaattggagagagttacgagatcaccaaaggacagaatgaaaa

SEQ ID NO: 1531 - DNA, 234 bp, Cyanidium caldarium
  Clone ID: LIB190-029-Q1-E1-F4
agcttgtagaggaatatgctgccaacaaagacttgttctttgaaaactatgcacaggcacataagaaacttagcgagttgggagcagtttgggtcaaataagcgtcgttgtggttgttgtttttgtggtggtgctgaaaataaaaaaagtcgttgttgtgcttgtctaaaaaaaaaaaaaaaaattaacgtatgcaaacaaagtacataagagaagataagcaggatcattttc

SEQ ID NO: 1532 - DNA, 376 bp, Cyanidium caldarium
  Clone ID: LIB190-029-Q1-E1-F5
aattctccaactgttatcgtagaaaaaagactctaggttgggttgaaccttttctgtggagatggaacaaacaacttgtcataaataagcagagaagagctttggggtcgaataacgtgagcattctatttagtcttgcggtgttggaagatagtcctgggtcgtcttctgtttctaccagcaacgacgttcataacggcaaagaaaacacactgagtctagaacagcttcaactgaataaggaatatgaagctgtagtaacaaaagtaacagactatggcgcctttgtagacatacgtgcagtaaagtacggcctactgcatgtttctcatatgagcgactcatttctcagagatccctcttaaatcggccacgt

SEQ ID NO: 1533 - DNA, 585 bp, Cyanidium caldarium
  unsure at all n locations
  Clone ID: LIB190-029-Q1-E1-F6
aggctcggaataccgggatcaccacgcgtccggttgttgttgggtcgtcacgttttggtgacaaggaaagataaatggtcgtcaaaacagaaacctgtagtttttcaggtttccgcatctaccccggaaaaggcactcgatttgtgcgcggggatggcaaactcctcatctttagtaaccgcaagtgcaaatcctactttcatatgcgtaggagaccggcagagttgaattggactcagttgtatcgaagaatgcacaaaaaaggacagcaagaggagacacagaagcgacgtcgtacgcgcaaagttgctgctgtaccgaaaccggtggaaggcgcgtcgttggaagtgatcaaagcaaagagaacgcaacgcccggaagtccgaaaaactgccaaagaagcagcgttgaaggaaatcaaacaacgccaagctgctgcggctggaaaaagaaaaggtggaagaagagatgcgacggcagcaacgtccaaaagaacttctgcaccaccttcgaccagtgagaaaaaacctgctcaagtcgttgtaggttcacganagagataaagaagagagtatggcactcgtc

SEQ ID NO: 1534 - DNA, 601 bp, Cyanidium caldarium
  Clone ID: LIB190-029-Q1-E1-F7
aggctcggaatatccggatcaccacgcgtccgcgcggcaataaagccacgtttggttcatttgagtgactttgtatccgaggactccgatgctatagcgcctacactaaaaaaagctgcaaggaatattccacattgtagtttaaggagtgcataatatctcataggaggttactgtttggttctgtcttgcaaagctaaatggagcagttacaggtgctactcctactcactcctagttttacgtctgtctatattgaattttcaatcgttgaagttaactttgatccataaaccactaatggaaattttagttggtggttctgctgttttagaatgcctcctaacaatatgcactgtcaagatgtataccataaaatgactacacagttacataaaggggtctcttctggtgccttcgacttgagtcaacttgtgcttcgtagttgatactttgtgattctttcaatagccagccaaggtaaaagtatacgtatttaaacaagtggtagtgctgaaagtgtcaaattggcgggcaataagaaacactgaagaagaccttgttgaatggagcagtttacacaacaaaaagttctgtgctc

SEQ ID NO: 1535 - DNA, 64 bp, Cyanidium caldarium
  Clone ID: LIB190-029-Q1-E1-F8
ggaataccgggatcaccacgcgtcgcgcccacgcgtccgcccacgcatccgaagtattcctgat

SEQ ID NO: 1536 - DNA, 402 bp, Cyanidium caldarium
  unsure at all n locations
  Clone ID: LIB190-029-Q1-E1-G1
ccgggatcaccacgcgtcggacgaaaaggaagtcaagtgaaactcgttccagaagtgccattgagagccactcatatggaaaatacttatgatttcttcaagcctaatctcagttcggaatatccaaccgtggatggtgcgaaaaccatcagctgttatcttcgggcgttggatacttgttatggtcgtttcacacgtcgtgcggaagaattgttgaagcaagaaaagttttcgttgcaggatatcgactacattgtatttcatgcgccttttcataagatggttcaaaagtcttttgcacgtttgctcttcaatgactttcgacgcgatccagataacaaattattcgagaatgttcaagcgtntcggaatatttcgatggaagcttcctatagtgataaa

SEQ ID NO: 1537 - DNA, 456 bp, Cyanidium caldarium
  Clone ID: LIB190-029-Q1-E1-G10
gtccacccacccgtccggagttgcaaatcacagaaatcaagacaagtcccgttgtcgatgagaacgaggtgagaaaaagaaatatgttttgcatcctactgaaaacttgcaggatcatattgttttggaaatgaccgacattttttctgtggaaggatgtgtcattggaaacaaacctcatgttactcgaattggcgattttgaagtagacgtcgttttagaaggtctaattcttgcatattatcaggtggacaaacctggacagattggaaaagaagtattctcggagaagccaatgtgaacatttcttttatgacgttgggtcgacatgtaccatcgcaaatggctcttgtattgctaggcttggagaatcaacccgatgagaaaacatcggaaaagattcgggtaaacctcgaattggagaagaacccgtgttattagacttgggtgaaattt

SEQ ID NO: 1538 - DNA, 399 bp, Cyanidium caldarium
  Clone ID: LIB190-029-Q1-E1-G12
gggtggacatgttgcacgttttgttgtcttggattgacagacagggcggagtgtgtgtgtacgattaattacgtacaagtgcacgcacattgattgatatatgtaaaccgactggtggcagagaaatgcgcatatgcagggacgatggagtgtgcagactcgtgagtatacactcagtttgaacaagcgattgaatgggtgtatttggtagagacgtgcacctcgggcaaacatagagttccggaagtttgatcaaacgcctatgggaacaggagatggtctcgtagaagcaccactgcatagatgtatttgttcacacggcatccgaaacgcatcttttcgtaatcgcatgaggctggcaacactggcaaatcaatacttacatgcacctcaatgctt

SEQ ID NO: 1539 - DNA, 255 bp, Cyanidium caldarium
  Clone ID: LIB190-029-Q1-E1-G3
tatacacaccatttttcacacaaccaacatgcaaataacacacgtaatccacgctgaacaccattctcgcatcaatacatgacccaactctaagaaaataatatttgtcacaatcgaattaattccaatactgttcagttcaatctctcgtgaaaacgtctgaacactcctaaaactcagaacatcagctaaatatcatacacatctcataatcgcaacactgcggctcaatccgttctgagtccccccctactc

SEQ ID NO: 1540 - DNA, 595 bp, Cyanidium caldarium
  unsure at all n locations
  Clone ID: LIB190-029-Q1-E1-G6
cactaggctcggaataccggaatcaccacgcgtccgcgcgacgcaagagtgaagatggaacactggagtccttacaaagacgaacttgtagctacagcaaaggcgctggtaactcctggaaaaggaatccttgctggggatgagtctacgggcactataggaaaacgttttgcctccataaaggtggagaataacgaagaaaatcgcaggagctatcgggagcttttattcactactcctaactttggtcagtatatttcgggggttattacttttgaggaaacgttgtatcacaagactagtcaaggaaagccatttgtggacgttatgaaggaagctggagttatccctggcatcaaggtagacaagggagttactccgatccctggtacgaaggatgaaacttccacccaaggtctagactcncttttgagtcgttgtcaaaagtattatgagaccggtgcaaggtttgcaaagtggagagccgtgataaaaatatccttggcagatggctgtcctagcgatgtggcaatcaaagagaatgcttgnggattggctcgttatgcagcaatatgtcaacaagctggtttggttc

SEQ ID NO: 1541 - DNA, 591 bp, Cyanidium caldarium
  Clone ID: LIB190-029-Q1-E1-G8
ccacgcgtcgggcgagatttgcctcgtcgaatgagagctctttgcgtggttggtttcttatcttcggcagagtctggttatctgcactataataaagcgcgtgtgccctttaaaagccagttttcacgaatttctctaaatactgtattaagggcagaaaaggcccttcaaacgagaagaaaattaagtattagccttttcttgggacttggcttgaaacaaaacacgtgttcagcactccatctggtacaggtgacaaatgccaccttcagtgacctggagagcagtagtatggcgggaaacgaggaacccgcagatagacaaacttttgaaaatttaaggattggtcaagtatttgaaggaacagtggaaaagttgatgccatacggggcttttgtgaatataggaccgaatctttccggactgctgcacgtttcacaaatctctgaaaacttcttaacagaccctgcagaagtgcttagtgttggacaaacagtgcaggttcgagtcattagattggattctgagaaaagacaatttgcactgtctatgaagtcctcgcgtaaacgagaaactagtcgtccaaacagg

SEQ ID NO: 1542 - DNA, 384 bp, Cyanidium caldarium
  unsure at all n locations
  Clone ID: LIB190-029-Q1-E1-H1
agaactcatatcaaccaaatcatatcgtcgtaatagaaggcttacatccatggtatgattccaggatgaaacagctcttagactttactgtatacttggatataagtgatgaggtaaaagtagcatggacaattcacagagatatggcagaaagaggccataaacttgaaaatatcttggcgtccattgagtctcgaaaaccggatttccaacaatatatcgatcctcaaaagaaagatgcaatagcggtcattcaagtactntccaaccagctcattcctgatgacaaagaaaagaacgtcttacgtgtacgttttatacaaagagacggaaatccccggatccaactcgtatatctgtatgatgaaggttccacaattgact

SEQ ID NO: 1543 - DNA, 437 bp, Cyanidium caldarium
  Clone ID: LIB190-029-Q1-E1-H10
gcgtccggagaaaaaacccagaagccaagataaggtatcaaagtaaagaaagaaggaaaaggagaagaagagagggtacgcttagaagcagcaaaccagagaggaaagcgttaaagcatgaaagaaaagaaatccgaaaaagaagagaaaaaggtaagaaagaggaccgaatcagggtaagaggtacaggagcaagaagagaagagagaatgctgggtggagtagcgaaacaagagaagggaagtaaaaggtaagaaagaggaaaggtttacgagagaaggaagtagaaagaagagagtgtaaggcggcgtcataatagaaatccgaaaggagtagaagaaaagagagagaagaaagaaaagaagagaaaagccgtactgaagaccgacacaggtactcgaggagaaaggagaaccagattaaggtgagagaatgga

SEQ ID NO: 1544 - DNA, 449 bp, Cyanidium caldarium
  Clone ID: LIB190-029-Q1-E1-H12
ccgggtccttcagaaatggtgactacctgaaacttcactctggaccaggaggtgtcaaaagtatggattggtgtgcgacactatttcgaatgtatattcgttgggcggaacaacattcatatgaagtggacattgtcgatgagaacaaaggagaggttgcaggtattcgttcaggaacgttgaagattgatggtggcgatggttgttcatttggttggttgagaaaggaagcaggagttcatagacttgttcgcatatctccgttcgattctggaggtcgtagacatacctcatttgttgcagtttctgttattcctgatgttggtgaagacttgaaggaaaatttgattgagcctggctctctgaggatcgaaacgtttcgagcttctggttcaggaggtcagcatgtcaacaaaacggaaagtgctatacgcatagtccacatccca

SEQ ID NO: 1545 - DNA, 498 bp, Cyanidium caldarium
  Clone ID: LIB190-029-Q1-E1-H2
catgttactatcctcatgatggtttgaagttctatgtgagtctttttacgagacctcctgtttctccagtatcttctgctgcggggagtgagaacggtgaaatggattctgctgctcttttgaaggaactgtgtctagatggctattccgcagaagtggaactgggccagaatgcacttttgaacagccaagacagtcctgggtcggtagacggagttgcagatgatattgcggccaacgttttgaacagcactcacgagtctacgaggaataaggacaaagttccttgttatgaccgtgattttgagtctgtttgcgaaccttttattgaatttcgccatagagatggcagttgtcaacgtttttctgaagttgttcgtcaatttgagaaaatagcttttgaaggtgttaataataatctcgtttaggaatcgtcgagaatatatttggtttctcttgcgcgacacaataaatcatcggtacttgtgccattttttg

SEQ ID NO: 1546 - DNA, 293 bp, Cyanidium caldarium
  Clone ID: LIB190-029-Q1-E1-H4
tccccaaccttgaggactttgaccggataatgaaaagttatttggatacttcgggcggacaattcttgaaagagacttcaccagaagtaaccactgaatttcggcaggcttttgatgatccaagttccggggatgatcccattgaattgccaggaaccaaggttcctccatggaaccaacgggttggccccaacaattttggaggaaaggaatttggtgggaccaaccaccacccctttagggtaaatatgccatatgcttggtgtaaaataaaggattgaacccataccttc

SEQ ID NO: 1547 - DNA, 546 bp, Cyanidium caldarium
  Clone ID: LIB190-029-Q1-E1-H6
aggctcggaaatccggaatcaccacgcgtccgaaaatgggtttgaatggagtcgacaatggacgtatatggtttgatcatgtgcgtattcctcgagaacacttattggctagattctgtcaagtttctgtggatggaagttattcttcggtttataagactgcggatgagaggtttgcagcacaattgggtgctttaactggaggtcgtgttagtatttcccgttccgctatgaatcagtccatggtccaacagagggagtggaaatacctattatgaactatcaaagtcatcagatgagattaatgccaccattggctgcaacttgtattatgactttgtgtgccaatcatttaaagtctcgttatcgcaaccgagccaatgagaatttaaaggaattgcatatttggagttcaggtttcaaatctttgatgacttggcaaatgagagatactttacaagaatgtagagaagcttgtggaggtcaaggatatacaagtgaaaatagaattggcgtcttgaagagctctttttgatgtctattgac

SEQ ID NO: 1548 - DNA, 441 bp, Cyanidium caldarium
  unsure at all n locations
  Clone ID: LIB190-029-Q1-E1-H9
gccacccacgcgtccggaaatggactggaatattttgtcgggacatttgcactcaaatacgggaaaccgagataatacatatatgatacatcagttggcaagatttggttacttcaaacaacctttattctgataaaacaagtactcaacgcaaacacgcaagtatggttgcctttgcatgcaacatcctttcttacgagctataagcgcttgttgtgtaagaaggataactgctgtagctgtaatagctactgtacatcggataggagcttgagtaacttggataataaggagtgggagttggttcctggatataatagaaaccatattccaggttgcataagagacattcgaaacaccactgataacactccaaataccattctggatagtaataagtcattggaggagcttcataggtagcatangagatgggtgaat

SEQ ID NO: 1549 - DNA, 415 bp, Cyanidium caldarium
  Clone ID: LIB190-030-Q1-E1-A1
ggaaggggagggaggatgatggtttggttgcggttatgggtggggttgacagggatggcaggtttcgctgcggcgataggtgcctggtggaacccatcctcgcccatcgataccatctaccgaaacattgcaccatcgcatttgctcgcatctccaatggatgaagcgtcgtcgtcgttggtaagccgcttatatgccacctggttatttctttcgaccgttgtgcgatgtacttttatgctatcttccgagttttccttgcctctagccgtcgtcaccttggccacctatgtcgtcgcgtgggtgcactttgcggtggaaatatttatttaccacacggtgccgttgaaacctggtgggcaagcacctttgttggttgcctcggtgtcgataagttggatgctgtgggatttga

SEQ ID NO: 1550 - DNA, 413 bp, Cyanidium caldarium
  Clone ID: LIB190-030-Q1-E1-A11
tcggcaccttcatcgaaatcgtcttcgaaaaccccgagaagagcatagactccctccacgtcgatggctacgccttcttcggcgtcgggatgggccccgggaagtggtcgccggaggtgaggaagacgtacaacctgctggacacggtgagccggcacacgatccaggtgtacccgcggtcatggacggcaatcatgctgacgttcgacaacgcgggcatgtggagcgtgcattccaacatctgggagcggtactacctcggggagcagttctacatcagcgtcgtctcgccggcgcgatcactgcgcgacgagtacaacatgcccgacaacgccctccgctgcggcaaggtcgtggggctgccgctgccgccgtcctacgcccccgcgcgctaagacgacgaaggcctcgtt

SEQ ID NO: 1551 - DNA, 108 bp, Cyanidium caldarium
  Clone ID: LIB190-030-Q1-E1-A12
gcacgggacaaaaatgaacaaggcgttcacgctcgagaagcccatggacctgaaaaaaggcgtgaaccacgtcgccgtcttggcgtccacgatgggaatgatggacag

SEQ ID NO: 1552 - DNA, 414 bp, Cyanidium caldarium
  Clone ID: LIB190-030-Q1-E1-A2
cacacgcgtccgaaggaactaggcaaaaggatatggtatctgcggtagaacatatgaaagaacgtgctgtgaagtgagagaacgtacgagaaagccaagtgaggaaaagaaggcaagtagagggcggcccgagaaaggagagggcgtaagacgtgatacagagtaggaagaaaagagaagagagctagaaaggaggtaaaagaagagtaaaaggactagaagaggtacggaattcacgaggaaggagcgtgaaggaaggaggaatcccaagtaatcgaggaagaaaaagcttcggtgaaagcgtgaacggattttgtacacactgcccgtcaagttctggaagtgtgctaggaataagcaggagaagtagaagagagtaggaaaagaagaaaggaagtgaagacgtaagacgtg

SEQ ID NO: 1553 - DNA, 442 bp, Cyanidium caldarium
  Clone ID: LIB190-030-Q1-E1-A3
cacacgcgtccgcccacgcgtccgcccacgcgtccgcccacgcgtccgaacagcaatgtgtaaagtatgtggctcaacaagttatcgcacccaaacaatgtgtcaagtactataccgagcagaagattcaacaaaagtattgctctcgctatgttactgaagaagaagtacaaagcaagcagtgcatcaagtatgtatctcttcagaagatcaagtacgagtcttgctctgctcaatatgaagttcaaaagatcaagcagcaacaatgtactatgacagtctctgaacaatacatacagcccgatacttgctacaagtatgtccctgaacaacaattggtgcctcatacttgttacaagtattattctgtacccaagtttattgaaaagtgctatcctcagtatgcaacaacggagaaatgtgtaaagtatgagtatgttcc

SEQ ID NO: 1554 - DNA, 273 bp, Cyanidium caldarium
  Clone ID: LIB190-030-Q1-E1-A4
acgcgtctgaacattttgaggcttgaccgagttgagttctgaaataactttatcataaggtgtcaagtatctcgattcagaagttctgtctactcaaggagttttacttggcatttcacttgcagttattttattgttctgcgtgaccacttaatggaattagaatgaaagctcttacttaaaataaaagtagtactttgagctttcaaaaccaaaaaattaaatgcgaatcagtaccattgttattaagaattgccgtcctacctgtaatga

SEQ ID NO: 1555 - DNA, 406 bp, Cyanidium caldarium
  Clone ID: LIB190-030-Q1-E1-A5
cacacgcgtccgctttggttggctgcataataacgcagtggcatctttcttttttgggggttcgtttgccgcgcaactgccgcactcagttttgttgggacaagttggctgcaccatgcacggaaattcagtggttgttattgtcagttgacggaagttttgcttgtattccatctagttgaaatgaagtcggtttatggtggattgtcgtcaacaacaacgaccaccgtctagtgcccgtgaagaaccacaaccatctttgcaaccttgttctgggatacaacgactcgaaaaagacgcttgatgatattttagtttggcaatggcgtgcaagttcgtcgtggaacctcgatggatatccttcctgaccgtgtattcaatgttttttggtgtagtagttactggt

SEQ ID NO: 1556 - DNA, 424 bp, Cyanidium caldarium
  Clone ID: LIB190-030-Q1-E1-A7
cattgggtatgtggtttctccttttttggaggcaccaagatacgcgaagcactgaatattgcgggaactctgctatttcgtttcttctatggtcctgggttgggtcccgttccttgggttattgtagcggagatctatccctggtatgttcgttcgcaatgtctcacgttgaactcgtttatcagttacatgctgaatttcgtcgtttctttttcatggccaacgatgctcaagtcgatgcatgcacaaggcgcgtttagtttctttgcaggttttacgttgttatccacttgctttatctatttgtttgttccagaaaccaaaggcgtggaaatggaagccattcaagaattgtttcaatatccattgtatactattgctaagaagaatctaagggaaaccaaagcgtatttgagcaagtttt

SEQ ID NO: 1557 - DNA, 420 bp, Cyanidium caldarium
  Clone ID: LIB190-030-Q1-E1-A8
caacacaggtactcgaggagaaaggagacccaaattaaggtgagagaatggacgataaggaactaggcaaaaggatatggtatctgcggtagaacatatgaaagaagcagcaccgactgtttagcaaaaacacagcactctgcagaaaagagaaaatgtaaagtatagagtgtgcggcctgccaaatagtagagaagaaatcgatgaaagtgaaagcgagtaaaagatgaggtatagagaatggcggtcctaactgtaaggatccaaaggtagcgaagtaaatagacgtttgaaaggcgtccagtatgaaaggagaaacgagtgtagcactgtctagtcgtccaactcagcgaaacagcaataactgtgaaaatgcagtaaactagcagtaggacggaaagagcccataattcttgacta

SEQ ID NO: 1558 - DNA, 420 bp, Cyanidium caldarium
  Clone ID: LIB190-030-Q1-E1-A9
ttaaccggtggttcaacctggctaataagccggcgtgcccttcgttcttcctcgtcccgatcccgacgacgctccgttcggctccggcaaaccacatcaagtcgcgatggagatgaagaaggtcgcctgcgccgtcctcgccgccgccgcctccgccaccgtggtcctcgccgccgaggccccggcgcccgcccccaccagcgcctcctcggccgcgttcccggccgtcggcgccgtgctgggcgcctccgtgctctccttcttcgcctactacctgcagtaaaattaaaggaggatcggagggagaggctgctggctgccattgcctgtattcggttggattccgtttatatatatagttaagtactttaatttgggtctgaacatgtcgattgatccattcattttatttgctttgcc

SEQ ID NO: 1559 - DNA, 452 bp, Cyanidium caldarium
  Clone ID: LIB190-030-Q1-E1-B1
cacacgcgtccgaaaagaaagaaattagacaaaatcctcataagattattcgaagactcttgtgtaaccaatcatgttgctcgagcatttgactttgctagtagactatattcttacaaggcgtacaaaattgcctgtcaagtagcaaaccaccataaattaggtgcactcgctcaaaaagtagagtcattgatggatcaatgtcctgaaattcaggaaacgaaaagttgtcttgtggatgattctgcggagtctccaacgatacaacaacataacaacaatgagaacatacctgttcgcgccaatcagagtacagaagctattcaggttgtacaaggagatcttgctattcaagacaaagcacaaggtatcggtgcatctgctttggtaactccatcgaggattcaagaaagaaagcccaaactgcaagaaatggcaaactgccttgatac

SEQ ID NO: 1560 - DNA, 461 bp, Cyanidium caldarium
  unsure at all n locations
  Clone ID: LIB190-030-Q1-E1-B10
tacggtcgcacttccgggtcaccagcgtcgataacccagattccaccaatctaatacggtccaatctaaagtgagctacttaacggactagttaatactagtgaaatagattagaccctgctggccatgttttaacttaaattagtacatcagaccaaaccacccatgaacaaataacttaccagcatattcatggtgaccacccctcccatcctagatgttgccataatacacttatcttatgccaccagcctgttaaccatctgtccttacctacaagttatcctaactacatgtccctaattcggataaagacttcaagaacgaagatcgaagatgatcgagctcatcaaatcaaggaaggataaggttcaagctagatcttcaaaagtaatcaagattcacaatcttggatagagtctttcctagccctaccctttcataancaaacctatctatgc

SEQ ID NO: 1561 - DNA, 363 bp, Cyanidium caldarium
  Clone ID: LIB190-030-Q1-E1-B11
cttcggaattcctcactgaaaaaggttactccttcaccacctctgctgaacgcgaaattgtaagagacatcaaggaaaagcttgcatatgtggctcttgaatacgaccaggagctcgagaatgccaagagcagctcatctgtggagaagagctacgagctgcctgatggtcaggtgatcaccattggggcagagaggttcagatgccctgaggtcctcttccagccttccttcattggtatggaagctcctggcatccatgagaccacctacaactccatcatgaagtgcgatgtcgacatcaggaaggacttgtatggtaacattgtgctcagtggtggcacgaccatgttccctggtattg

SEQ ID NO: 1562 - DNA, 431 bp, Cyanidium caldarium
  Clone ID: LIB190-030-Q1-E1-B9
ccctcgtcgtcgtctcactcaccccgccttcacgcctccctcaccaaataaggtcccgcccttttccgacattcacaggggggacaggaaatcagcggccatggcctcgattccggcgacgaccttcgccgtcatcttatccgtcctcgtctgtgccgcggctggcaccgccgtcgacaacgacctccccgactacgtcatccagggccgcgtctattgcgacacctgccgcgccgggttcgtgaccaatgtcaccgagtacatcgcgggcgccaaggtgaggctggagtgcaagcacttcggcaccggcaagctcgagcgctccatcgacggggtgaccgacgggaacggcacgtacacgatcgagctcaaggacagccacgaggaggacatctgcgaagtggtcttggtggagagcccgcgcaaggact

SEQ ID NO: 1563 - DNA, 435 bp, Cyanidium caldarium
  Clone ID: LIB190-030-Q1-E1-C1
aaagtatcggtagaacagcctgtgtatgaggttgaaaagaagaccgcagaatatgagataagaaagtaccccagcttaagaatagctgaagttcatcgttcagactggaaaaaagaagagaatggctcggcatacgactttgagtcgcaagcatttcgagtgttggcgtcgtacattggtgtatttggagaacccaaaaacaaagatagctccaacacgcatgttaagatagcaatgacagcacctgttttatcacagcccatagggtccgtggaaacaagaatggacgacagcagtctagcgtttatattgcccaaggagtatgcagagcaacaagaacctccacagccattagacccacgagttcacttgcgtattgtacctgtcagaaaagttgcagcgactacttttagtggtactgtcaatcgtgaaaca

SEQ ID NO: 1564 - DNA, 464 bp, Cyanidium caldarium
  Clone ID: LIB190-030-Q1-E1-C11
ttcccggggtcacccacgcgtccggaggaacacgccaacaagtacaaggtggtggacgcggtgacggtgctagagatgcaggtggacgcgttcaagaagcgcgtgaaggcggcgcggaggctcgccaaggaggaggtcaagacggccgcgacgcccgaggcgcggagggcgctgaacctctgcaagacctactacctggacgccgccgacaacctcggcgcctgcaagcgcgccatcggcttccgcgacgccgtcaccatccgcgccacgatgagcatggtggcgcaggacacgcagaactgcgacgaggagttcaggaaggccgtctccaagaaccccatggaggaccacaacaggtcgctcatcgagatgtccgagatctgccgcacgctctccaacatgatcccttacgaacatgtccattgatttgtttgtttctttttcccgaccccctactacgttcg

SEQ ID NO: 1565 - DNA, 257 bp, Cyanidium caldarium
  unsure at all n locations
  Clone ID: LIB190-030-Q1-E1-C3
tacggtccgtatctcncgngtgcgaccacgcgtccggaaatcatgaaatggtttttattgaaacaagaaaacccaaagatacctcttcaacaacttagtccactacacgatacactgtttactagaagggaaacttttattgtgctaatacgagctttttgacccttactcacactttttttcggaagtatctgaaccacctggcagtggtatttgctgacgtccactttggtaaatttgtgacttgctcctttaca

SEQ ID NO: 1566 - DNA, 440 bp, Cyanidium caldarium
  Clone ID: LIB190-030-Q1-E1-C7
catgtgcaagtcaacaaacatagaaaagtaaagagattgcaagaagataatattttgaatagagcactatcacaaccaggagatgtatttctgtgcttttgcaacatccagttgttggtgaatgcagaaagagctattataggaaatattacttgtccagaaagtatcgaattgtgtcgtctattagctggacatatagcggtttggttcgatgaacatttggatgactttcgtttggaagctatcttgggagcactattgtgtacttgttattgtgagtggaagcgttttgaaggagaattgggggtacaagaatggaatgaattggagaagatatcttccttagatacttggaagcttgtgcttggtacaagacaaagagtggataatatgttacagcgagtacacaagctgacgagcatcttgtcctttttatactc

SEQ ID NO: 1567 - DNA, 288 bp, Cyanidium caldarium
  Clone ID: LIB190-030-Q1-E1-C8
gttatggaagagtaggacgtggaggaggtccaggtagaggtagagctcgaggtggagccggagaatttggctatgccttttaagttggcagtcactctttcgcatgaagactacgaaagtctcgtagtcttgataaacaaccttatggaatgatagaccaagttacaaatgtttgtttgtttttgtttctttttgtgtgagttgtgtgtttgaatatttgttcttttcatgagaagagtgtcttacctctgccttgataaaagtagccaaacggatggattggtcgcg

SEQ ID NO: 1568 - DNA, 409 bp, Cyanidium caldarium
  Clone ID: LIB190-030-Q1-E1-C9
cggggccaaccaagccttcggacaagccttcggggcgctcgtggtttcatttcttccccccttctctcgtcacgtccaataaaaaggggggaaaacttctctctctttttttccctcccccgcccgaatctgatgcttaaaccctcgccgggaggaggattccaatcccgacgcaccagcccgcgcccgccacctacagccgcgcccggatctccgccatggccgccgcgccgcaccaggcccagggccccgcagatagtgtgattccgctgcagtctgaacctgcacttgataataatccctccaagagtgcaaacgctagggaccagattctttctggtacggagaatgtgactacaggcaatgcacgcggcggcagctccttgaaatcgcaaaaaggcccgccaga

SEQ ID NO: 1569 - DNA, 225 bp, Cyanidium caldarium
  Clone ID: LIB190-030-Q1-E1-D11
cacgcgtccgcacataactaacctattgtactctacaataatacaaaaacggaaccctctttccaaatccccaaaaattgtatctcctagtttgaaaaactatttcacatcacttcatggtccggtgggactccttggatcaatgatcgttaatttggggagtgattacgaattgcactaaagattcactgttcagttcccattaactatacaaatcaccccacc

SEQ ID NO: 1570 - DNA, 105 bp, Cyanidium caldarium
  Clone ID: LIB190-030-Q1-E1-D2
acgcgtccgcgatagacctctgcccacgcgtccgctcacgcgtccagctgattcttgggcttatctcacaagtctggtgccttgttaactgtacgagcatacttc

SEQ ID NO: 1571 - DNA, 400 bp, Cyanidium caldarium
  Clone ID: LIB190-030-Q1-E1-D8
cacacgcgtccgcccacgcgtccggaaaaggccaaattgttggatgccaagtttctaaggaagtattatgaggagaacaaggacttcttcttcttgtcgactagagaagagaagaaaatgtttgtgacgttacaacttgccagggaatatgcagagctggtagatgaccaattcttgaagggcttcttcgagaaggctctggagtctgctcagaagacgttttaatttgtcaagtagagtgtagtgtgcgtttttctgtgtgtatttgtctctgtgtgtgtgtgtctgtgtgtgtaatgagtggagccgagtcagagaaaacggcttggttctttcctgtggacatagtgggtaaagtctgatgggtttctccacggctttttagtaaataaaagttggt

SEQ ID NO: 1572 - DNA, 377 bp, Cyanidium caldarium
  unsure at all n locations
  Clone ID: LIB190-030-Q1-E1-D9
taccggtcgtacnattccggggccacccacgcgtccgaaaagaactaccctattgtactctatataagagatatcgagaagttccttcacaagtccccaaaaatgtatctcctgtttgaaaaactattaaacaaacttgatggaccggtgttagtccttggatcaaggattgtagatgtggagagtgatgaggagttggactacagattgactgttctgttcccatataatatagaaatcaagccacctgaaaacgaaaaccaccttgtaagttggaaatcccaattagaagaagacatgaagatgattcagtttcaagataaccgaaatcatattatggaagtccttgcagaaaatgatcttgaatgtgacgaatt

SEQ ID NO: 1573 - DNA, 271 bp, Cyanidium caldarium
  Clone ID: LIB190-030-Q1-E1-E1
agattatgatacttttgtgagtgcatatgacgatgatagacgaaagaggttgtcttcctcccacaaggaagaagatagcaagtcgagttcatcttccaagcatgacgaagaggaagaagaagaaggagatgacgattcttcttctcatggtggaaagaaaaaaggtcgtcacccaccagatggctttgtacctgaattggcataatcttgtttgtattgctatgtatgtatgtttgtaggtgagaggcgcgaataaattttccttttcccc

SEQ ID NO: 1574 - DNA, 438 bp, Cyanidium caldarium
  Clone ID: LIB190-030-Q1-E1-E12
aaattttgaatcgatcttgtccaagtgagaatggcggcaaagaatgaaaactcttgttgtatgcttttgcaagtgaagagactaagcaaggacgctgttgtacctcaaagaggttcgaaacttgctgcaggttatgacatttgttcctcggaagactgtattgtaccagctcgaagtcggtactgtgttaaaactgacttggcagtggcgattccctcgggacactatggaagaatagcacccagatcaggacttgccttaaagcatggaatcgacgtaggagctggtgttatagatgaggactatcgaggaagcctcggtattattttatttaatcattccgaagaggatttccatatatccaagggaaatcgaatagctcaacttatcttagagagaatatctactcccgaagttgttgaagtggataatctcgat

SEQ ID NO: 1575 - DNA, 255 bp, Cyanidium caldarium
  Clone ID: LIB190-030-Q1-E1-E2
acgcgtctgaagatatgatacttttgtgagtgcatatgacgatgatagacgaaagaggttgtcttcctcgcacatggaagaagatagcaagtcgagttcagcttccaagcatgacgaagaggaagaagaagaaggagatgacgattcttcttcgcatggtggaaagaaaaaaggtcgtcagccaccagatgggtttgtacctgaattggcataatcttgtttgtattgctatgtatgtaggtttgtaggtgagag

SEQ ID NO: 1576 - DNA, 449 bp, Cyanidium caldarium
  Clone ID: LIB190-030-Q1-E1-F1
cagacgcgtgggcaaatacataagcaggaggagcctttgtatagccatctggattcatatttgattgttgagtatttggataaagaaacatattgctgtagggtcgaaaatcgttccacgaccactgcgaaggtgccggtgatgggtaagctgtctcgacataaaaagagcgacccacttctggcgttttgtccatatcagagttcttctcattcttctgctggggtggaaaataggaagacggagaattggcatctatttgaggaccgtagaaataatttgaaggtctctctatctttgcaggttcactagtcattgtcatatcgaaaggagctgttcttgatgagttattttcgtgtatagtaacagaattcggagtcctggtgtctgtcatgttcttctgggaagtcgctacagaatcgctctttgaaggaccgcccttcaatgaa

SEQ ID NO: 1577 - DNA, 194 bp, Cyanidium caldarium
  Clone ID: LIB190-030-Q1-E1-F10
aggtgcggctgagatatcgagtgttgtgcatgtgggcatgacagtcggcgacgacgagaatgtagccctcgtagcttctgcataatgctcctgcgcagtattcgaggatggggtcctttgggctctacttcgctaagttcgggcgccggctcgttgatcttctcctgtgcaagctatgtacgggtgaccccgtg

SEQ ID NO: 1578 - DNA, 155 bp, Cyanidium caldarium
  Clone ID: LIB190-030-Q1-E1-F2
gcgtccgcacaagcgtccggaaccaaatgaagcaattgtacaagttgccactccgtcttttgtaacatagctcccagcggcagttattgccgagaaacccgttgcaccttgataaaatcctggagcagctagagataactttggagtgatacttt

SEQ ID NO: 1579 - DNA, 105 bp, Cyanidium caldarium
  Clone ID: LIB190-030-Q1-E1-F3
cgaaacatctaatcttcattgtgtcacaatgacctaaccactttgattcacattcaaagtgaaaataactggctagctccttttgtgttacattgcaatgtttta

SEQ ID NO: 1580 - DNA, 456 bp, Cyanidium caldarium
  unsure at all n locations
  Clone ID: LIB190-030-Q1-E1-F4
cttcgcctaggaaccacaaactttgtactgctgtaacattttatggctactgaacaagtgactattttaaaggataagccaagtgaacttgtaactttgtagaacggtttgggccttgtagcgagataggattgcatctagcaacggcagggatttcatggtcgaaaaggagcgtgaaaacgtatcacttttatccgaatccttcaactacatatgtaacgacatatagtgaattttaggagccacgaggaaagtttccagcaattatcctttatgtagcgaaaacgaagccttacatcaaacatggcaagggacaagactctggacttgttagagcgacgaaggttttgtatcacgagccgacaaagaacccttgcattcgtcattttgaggctttacgtcagtttntcgacatgcaaaaatgttacatttgtaataaaaattaaacatttgact

SEQ ID NO: 1581 - DNA, 443 bp, Cyanidium caldarium
  Clone ID: LIB190-030-Q1-E1-F7
cacacgcgtccgcccacgcgtccgaaatacacttcgatttatggttggcaatttatatgattttagaaaacaagaggatgccatttctttagctgaattacccgaattggacaagtatatgctccgtatatttggcaagtttaaggaatccgtggagaattggtacgagcgatacgagtttacctttatttatcaagcacttcagcgactttgtattacagagttgagcaacttttatttggatatttcaaaggatcgtctctatgtctctgctcctgatgattttcgtcgtcgaagttgtcaaactgtcttacatattttactagaagacttggtacgcatacttgctcctattcttcctcatactgcagaagacctttggcaatgttttgagtctcgacaagatgtgaatgctgcttctgtatttcagtctggttggatat

SEQ ID NO: 1582 - DNA, 458 bp, Cyanidium caldarium
  Clone ID: LIB190-030-Q1-E1-G10
acggtctatatccgggtcacaacgcgtctcaaaatttgcagaagaatgtggctcacaagaacaacagtttgcaagaaagctccacttgcgttttttatggactcctatagcttttcaaggttataacgacaacacgaaagtagagaatagacacgaaaatagactttgctttacagtgttcaggcgaaatcgcctcaccggttcaagtggaaggcagaaaccagttctgttagaagagtcagctggcaacgtctattggaaccaatcttgtgagttggcttttaggagtataggttataaaggcaagccgtttgaacttgttccctttgacgaacgagctggagtcgttcccaataagtgtggtcgcgtcttgagccgagtcgaacaaacctcggaagaagaagagttgtttgaaaagggactgtacgttgttggctggttgaaaagaggaccaacag

SEQ ID NO: 1583 - DNA, 444 bp, Cyanidium caldarium
  Clone ID: LIB190-030-Q1-E1-G11
ccacgcgtccgcacacgcgtccgggcgggtccgttccccggggacggcggccccttcaacaacctcgacttctgctgctactgccacgacatggcctacgacacccacgaccaggcccagctcctccgcgccgacctcgccttcctccgctgcctcgagggcagccggcacacgcccgcgcgcgacggcatcgccgccgcagccatctaccgcgccatgtgcatcttcggactgaagacgatcctgatcccgtaccggacgaacctcgtgcggctacagacggggcccaactacgcggatttcttcgccgatttcgtgaagagggtcgcgtcgtcgtcgggcaggccgaccggcggcgagaagcagaggctgtgaacgaatttgctcgcctcgtcctacatgtaaatgtggtagatcgagccgaattggttggggccttggggg

SEQ ID NO: 1584 - DNA, 470 bp, Cyanidium caldarium
  Clone ID: LIB190-030-Q1-E1-G12
tacggtcgtatttcccggggcgccgaacacgcgtcaaaagctcttccttatattctttgtgcttggacaatggttgcaaagactgctctgagttgcctctttctctctttccttatcgctgccgcagttgcagccgacgtagtttcagaggagagatggggatatgctcagcaaacccaacaacagcaacagtgccaacaagtatgtaaacagtatgcatactatcagagtccagtctgcacttccgtaaccacacagagcccatactggacccaatgctcgaagactgtgcaaacctttgtcccaagccagtgcagtacttatacccaatctcctacatggacctattgcagcacctacaccaccactagcgtaccatctcaatgcagcaaggccgtgactacttatactcaaacctgctgtgcttatgcccaacaaacttcctatgcagtcagtaccgagcaatatgt

SEQ ID NO: 1585 - DNA, 417 bp, Cyanidium caldarium
  Clone ID: LIB190-030-Q1-E1-G4
gcgtccggcgtttctctcgttcttttgtggtaagagctggcggtgtgggaggtgtttggaaagtgtccaaccaagtgaatccatctcgactgcagcgcttggaaaggaacgaaagagtgcgaagagcaggttgggaactttatgactccaagttgccaaaggaacttcgagcacaattaatgccaagttctgacaaggaagtacgaagctttgtggaaatgagaatacgggaaatgatattgaacggagactttgaaaatttaaaaggcaaaggaaaaccattcaactattctgatgctgcagtgagtacttttgatgtggctatgaagatgcttaaaaacaatgatttgaagccaccttggtaagttgacaaggagatacaagtcgtacgtaatatttgtaggattgagttgatgc

SEQ ID NO: 1586 - DNA, 414 bp, Cyanidium caldarium
  Clone ID: LIB190-030-Q1-E1-G7
cccacgcgtccgggtggtgatgccctggattgagctacgtagtggcaactccgctgtcttgaaagacataactgcaagtattgaaaagcctgacataaaatggataactaggacgaatctcagtacttgtctgaattctgcagaaggaaatgttacggttgacttgtcgcggcagtgtagcttgaaggatatattttcattgaagcttctcgacaataactttaagttggcgtgttttaatgatgccttgtttttagttttaccaggcttatcctttgttattactggtaatcgtatattctgtagacgctcggacttgaatgaaacggaagcattggagtcctgcttttcgtttatgaagatatgccccacgtacaagtcgttggagattctttttggaagcgagcaaattta

SEQ ID NO: 1587 - DNA, 459 bp, Cyanidium caldarium
  unsure at all n locations
  Clone ID: LIB190-030-Q1-E1-G8
cagggaagtatgacccagtaatgaggagtggagtaaacagaaaaggaagtaaaaggagggaatgaagggaagttatggcaaaaacacgtgccagcagcagcggtaaaacgtgtgtagcaagcgtagagcagaagaactgggtgtaaaggtcgagtagtagagtaagtgtaaaagggaaaggaaaggagagaaagaggaaagggatgaaatgcagagatctctagagaaaggcaagaaagaaaagaaaggaagacacagtaaatgaggcgagaaagcataggaagtgaaacggattaggaacccgtgtagtctatgcagtaaaagaaagaatgagtaagaaaaaagggagtcattccaccaggggagtaaaggcgcanganagaaacccaaagcaattgacgggaatcggaaaaaggggtggatcacgtaaattaatccgatgtaaaccgagaaccttac

SEQ ID NO: 1588 - DNA, 266 bp, Cyanidium caldarium
  unsure at all n locations
  Clone ID: LIB190-030-Q1-E1-G9
tacggtcntgatcttcccggggtcacccacgcgtccgaacacgcgtccgggcgactgtgactggtggaggtggtaggtctgccggcaagaccatgctcctggacgtggccaccgtggtcctcgaggacgagcgcctcggcaacgtggagacgaccgcgctgatcaagatcacgcacctcgagatggtcagcagcatcgtcggctccatcgacggcatcatggcccagtagtaaggccgcggcgaccagggcgacatgaggctcgcg

SEQ ID NO: 1589 - DNA, 419 bp, Cyanidium caldarium
  Clone ID: LIB190-030-Q1-E1-H10
cgcgtccagcgcaatgaccaagaatatcctgctacgccgaacattgtgtagttcttcttcagcgacaacaccaagaatacgatattttggaaaaccagatagatccaaatacttgccatttgctccttgcaattcgttaaagctatcacaagaagagttggaacgattgccacctcaagtgagacaagtattggaacccaagtaatgggatggaagaacgtatttgaaggcaaatatatggaatgcagtgttggcatttcaacgaaaacctggagatactgggtcggcagaagtacaagttgcggtgttgaccaatagaatggaagcattggagaaacagtgcaaaagaaaacaagatgatacgagagcaaggtacttgttggatcactttacttcgacgagacagagactgttgcaat

SEQ ID NO: 1590 - DNA, 255 bp, Cyanidium caldarium
  Clone ID: LIB190-030-Q1-E1-H4
tggcacccgataaggattttggtaggatatataatacacggtatggcaagtaaagtgggacatgtacgtataatgaggactacagagaagagtacgttagtgataacgttgggaataataatatgaggaatgtggtcgatcgaactagaaagatggcgaagatcctggagttgggatggagtaaaaaacgtgcccatgactatatggctgatgataataattgggatacacattggaacgactacgggaataaac

SEQ ID NO: 1591 - DNA, 462 bp, Cyanidium caldarium
  Clone ID: LIB190-030-Q1-E1-H6
ttccgggcccacccacgcgtccacagacgcgtgggcaagtagaggatttattggaacaaaatggaatccagaataagcgtgtaagagaattcattttagaaaatttaaccacggatgatgttcatcctaagcactttaaatggcgcgtgaacgtttctgctttattgaattctatgaatagaatactcgaatttcctgtgaaagaagggaaaacatactctcgcccgacgctatttatccgaggagaaagatcaatttatgttatgaatccgtccgctgaaaaggctattcggacttttttcccaaaagcagtcattgaaacaattgaaggagcaggacactggttaaccgttgaggcaccagaaaaattttgtgcagttgtgaacagtttccttcataactcaactgacttgcgtcaaaggggcagttcgtttgtttgagttagtttcacatccaggacag

SEQ ID NO: 1592 - DNA, 431 bp, Cyanidium caldarium
  unsure at all n locations
  Clone ID: LIB190-030-Q1-E1-H7
caacaaaatgccaactcttttcggaagagaactggtgctgttcgtaaaactctagagtctaagtgtaactgcactttagaatatatcgatgcacctcatacagtggaaccagctggagaaattctgattgaagaaacaggagaacgaaagtggattggtccacagcttggttggtggaaggcttcttcggatggaaagcactatgaaggctgggaggaaactgtcgaatatttgaggagtgtgtttcgtttgcagggtccttttgaaggtgttttgggatttagtcaaggagcagccttgagctctctcatttgtgctatgaaagaacatccagaacttggctatggagaattttcttgcatccgatttgcccttgttttttcaggtttcgtttcncgtgcagaagagcatttgcgtttgataaaaacaaa

SEQ ID NO: 1593 - DNA, 437 bp, Cyanidium caldarium
  Clone ID: LIB190-030-Q1-E1-H8
acgcgtccgcaaacgcgtccgggacggaaaaagacaaaaatacgatcgatgcagatgaaaagaagagaaatcaaaagttgactttttcaacaatagtcaacgacgcattgtaagaaattccctttcgaattcacaatcaaaaacttttttgattccttttcgtacattttggattgtggcacacaacatgaaaattcctgtccgactcgtcaagttttctttggaaaaaaagaagccaacttgtttcaacagaagtataagtggaatcgcctacactttttctcgccatggacaggtttctgatgtcttgaaaaaggagactcaaagctatgatgagaagaaacttggtccttcgcaagtactcgtgtcgtttcttgcctcaagtataggcacaacagatttggcgtggataagaggtatgggaaagataacagaag

SEQ ID NO: 1594 - DNA, 426 bp, Cyanidium caldarium
  Clone ID: LIB190-031-Q1-E1-A11
cccacgcgtccgacagggaagtatgacccagtaatgaggagtggagtaaacagaaaaggaagtaaaaggagggaatgaagggaagttatggcaaaaacacgtgccagcagcagcggtaaaacgtgtgtagcaagcgtagagcagaagaactgggtgtaaaggtcgagtagtagagtaagtgtaaaagggaaaggaaaggagagaaagaggaaagggatgaaatgcagagatctctagagaaaggcaagaaagaaaagaaaggaagacacagtaaatgaggcgagaaagcataggaagtgaaacggattaggaacccgtgtagtctatgcagtaaaagaaagaatgagtaagaaaaaagggagtcattccaccaggggagtaaaggcgcaagaaagaaacccaaagcaattgacgggaatcgcgaaa

SEQ ID NO: 1595 - DNA, 457 bp, Cyanidium caldarium
  Clone ID: LIB190-031-Q1-E1-A3
gggtccaggcacgcgtccggaataatacgtgtagtaccagaatattcttttgcgctgtctaccaaagagaggtgtccgtttttacttgtatatgaattggaagatcttggaccagaaggagttagctcaccaagaaagacacatcatgaagaggatcctacttccaatgagttgtggtctgtggaagaatctggtcaaaatagacatagcgaaagcgatggaagaagaacggatagtgaggagggaagcttatcaaagaaatttgccattaccaaacgtcttggaaaggaaaattctcatcagatgagacgaacagagagagctgcaatgaagaaagaggcagttgcactggcagcaggaggtgcttttgagaatgaacctaatcgtccggacgagtctttcaactttcaaacaaatgtaaataccgaagaacaggttactgggaatgacgatgtgt

SEQ ID NO: 1596 - DNA, 436 bp, Cyanidium caldarium
  Clone ID: LIB190-031-Q1-E1-A6
gattggtggcgagttgagctttgttttggaactgttttttgtgggtttcactcgtgtgttttgtctttttaaattcgaagactatttatttcttgttatgttttagaggtgtttctagagtgtgtttttggagttgttgtactcctgtcgtggtggttggtgaatggctctagtgacaaagagcattgttactttcccgccattctccacagctccaaccaccaacttgtatacgcacacatatacataaccacatattactagagagtcgtggtgtaaaaaacgacaattcgaatggttgaaaaggcttgataaaaagcaaaggactagtgaaggtgttagagaaagcacttggaaaagggggccacttccttgtatatttttgctcctagtaactaactaattccgcttggagatattgtaagtttggtgtatt

SEQ ID NO: 1597 - DNA, 196 bp, Cyanidium caldarium
  Clone ID: LIB190-031-Q1-E1-A9
ccacgcgaccgcacacgcgtccgcccacgcgtccgcccacgcgtccgcaaaaaatatatttaaaaaagttaaaaaacccattgtaaaatatggaaattgaatataaaactttaacaaattaaacatgaaaaataaatataaatctttataaagtgtgttaaaacataaaatctccagaaatgatgcattaacttct

SEQ ID NO: 1598 - DNA, 442 bp, Cyanidium caldarium
  Clone ID: LIB190-031-Q1-E1-B1
cggggccagcacgcgtccgcacacgagtccggccggattgagaccgcaagtacattgcttcttgtttccaacaagagatggccgaagtaaagttgtttaacaaatggtcttttgaagacgtcgaagtcaatgacatgtctcttcacgattacattgcagtgaaacaaaagtatgctgtttatttaccccatactgctggaagatatgccgtcaagcggttccgcaaggctcagtgcccaatagttgaacgcttagttaactctttgatgatgcacggcagaaacaacggtaaaaagttgatggcggttaggatcgtgaaacaggcttttgaaatcattcacttgttaacagacgccaacccggttcaagtatttgtccaagctgttatgaacgctggacctcgtgaagattccacccgaatcggctctgctggtacagtacg

SEQ ID NO: 1599 - DNA, 352 bp, Cyanidium caldarium
  Clone ID: LIB190-031-Q1-E1-B10
gaatagacgtcctctcactgcttctgtcttgaactatccatggaagtgtatcatatcaagctggcaggacgactaccgtattggtactgagaaaacgtcgaggtttttgatgtcagtactagcgcgtattgcacagtgtctaaggcggtatgaccaagtctcggtgactgtagtaagaactttacgcatctcctcgcgagaattggtccaatttgggacataaagtcgtgacatcaacatgtctgaaacctgtctgtcatgcttatagcacaagaactgggtgtaaaggtcgagtaggatactacgtgtcatatggaaacggcaggatagacagatgaatgggatgaaatgc

SEQ ID NO: 1600 - DNA, 378 bp, Cyanidium caldarium
  Clone ID: LIB190-031-Q1-E1-B3
gcgtccgcagttatgcactgttattaaggaaattcttggagacaaagtggagaaggtggtagtttccgaaagacttgcggaatctccatgtatccttgttactggtgagtttggttggtcggccaacatggaacgtatcatgaaggcacaagctttgcgtgattcgtccttggcaatgtacatgtcatcgagaaagataatggaaattaatcccaacaatgccatcatgcaagaattgcgtcaccgtgtggaagcagacaagtcagacaagaccgtgaaagacttggtcaatttattatttgacactgcattgttgacttccggattctctcttgacgatcccaacgtttttgcctctcgtattcatcccatgattaa

SEQ ID NO: 1601 - DNA, 300 bp, Cyanidium caldarium
  Clone ID: LIB190-031-Q1-E1-B8
tagggaacacttcatatcgcactgctttgtgctttcgcttcacgcatcacctgtaaaaaaaaaatgcaagtggtgatatgttaacgccaaaaaataaagtctttgctttttatttttgaaaaaaaaaaaaaaaaaaaaagaagaaaaaaaaaaaaaaaaaaaataagaaaaaaaaacaattaagcaataaaaattgccaaacgattgttgaaattggcatccaaataaacacatagaaaagagtgccgaaaaacttaagcagtttagtgaacagatactagacaatcaagtcgaacttga

SEQ ID NO: 1602 - DNA, 314 bp, Cyanidium caldarium
  Clone ID: LIB190-031-Q1-E1-C11
ccacgcgtccgccaacgcgtccggattttgcaagtgtcgcacagcattatgactattcaaagtcagcaacgatcaaagagtgaatctcaacaagttggactaacttcgatacctaacagtttgtcggagttcattaaaaagttggatgactcggagggagaacttttagccgttgcaatagacagcagttcaaggctccaagaatggcgaacgaggagcttagggaatcgagagaaagattcttatcattccgggaagagggttcgagagtttgaaagcgccgactggaagcctatggagaagctttctagaac

SEQ ID NO: 1603 - DNA, 380 bp, Cyanidium caldarium
  Clone ID: LIB190-031-Q1-E1-C2
tcaccagtggaattcgtgcgatggtggatgtgaagccacatgacgcagtcgttgcatgtcaattatgcatcaacatttggcattgcaagcagctatgaaattagcatattctacgaagaactatctttatgcgctgaaatttgccaatcgattgttggagttggcacccaatgaagacatggagaatactgccaaaaaagtgaagcagttttgtgaacggaatccatccaatcaattcgaaatagagtatgatatggacaacaataacttgcagttggatgctggtagattgaaaccttgcattccaagcaagagttgtgtacattgtggtgcttgttacgattccagttggcaatcgacgacttgtacggtatgtcaag

SEQ ID NO: 1604 - DNA, 308 bp, Cyanidium caldarium
  Clone ID: LIB190-031-Q1-E1-C4
acgcgtccgcacacacgtccgactcttgctactttcttatccgtttatgccaattggggctttataaatattgaaggagttggctggggctgggctgcaactgcctgagtatggaatgttgtttggttccttccttgtgattttgtgaagattggagttcgtaccactattttgtccatgcgatacacataatgctcttctagattatttaagaagctctccataacgaggctcttgcgtcattttcgcgatcatgatgaggaagagtcagaagaatgtgaggatgaggatgaacattatgaatatgg

SEQ ID NO: 1605 - DNA, 337 bp, Cyanidium caldarium
  Clone ID: LIB190-031-Q1-E1-C6
aagacgcgtgggcggacgcgtgggcggacgcgtgggagtagaagaacaacgagaaaggaaacaactgagtatcaggaagaaaacagggagtagatgaggaaagaaagatcaaggaagtaagagtaagagaaggagtaatgtgaatgaaagcaggaaagtatttgacgaagagagtgtaaagcgcgtaccttttgcagaatgtcccaccgagtgagcgaggaagcaaaatgagagagccgcatctacccaggtaagacccgaagctagttgatcttatgctgtccaagcgaagtaaggctgaaccattatctgtgcaaaaggatttggaagagatggc

SEQ ID NO: 1606 - DNA, 90 bp, Cyanidium caldarium
  Clone ID: LIB190-031-Q1-E1-D11
ccacgcgtccggtaaaaagacgtcgtttgtgagtccaaaaaaaaaaaaaaaaaaaaaaaaaaaaaaaatacaacaactcaaaaaaaaaca

SEQ ID NO: 1607 - DNA, 376 bp, Cyanidium caldarium
  Clone ID: LIB190-031-Q1-E1-D5
aaaatgatgtctcgtccctcagattgtagtattattggaaacgcagtagatcagaaggaactttcatttacctgcaaccagtattgacgatcgacagattcacacagttatggatcgtcgtacaaaaacatggcctttgatgcatggacaatcaatcttgtctggaatctatcgggcaaaatgacttcaaggaccctttgctgacatgatagattttccatccttgttatgcaaaaattccattcatgtgaaatacagtgttctagctttgtcgcttgatctgagattcattactaggatagcagcctctttcaatgccttcttgatgacacatcttccatgtctatggtgtagaatatctgcgacccgtgttact

SEQ ID NO: 1608 - DNA, 437 bp, Cyanidium caldarium
  Clone ID: LIB190-031-Q1-E1-D6
cacacgcgtccggaacaccgcaggtggcagtctcggtgtgcatgtaacgagttgcacacgtccttggtcaccttcgtacttgcaagccgtctttcgtgactggaaacacttttacgatcacaaaaagacaactgtacacttacacaggcgtggtgctttctcttgtaaccacagtcactctagcaaacaacagcgtttaggaacctttgtagcaaatacatcgtcgtcgaaatatataccccaacgcctgcttatgaacgacaaaggcttattgaatactttttctagatcccctttggatagactcaacaaccataggaaccaggcctcgttagttgaagagtgtgaaaagtccaaccaagtgagatacgtcatattctttcaacgtgaaccactgttaaaactacaagtggaacaaggtcatccagaaggaaccg

SEQ ID NO: 1609 - DNA, 409 bp, Cyanidium caldarium
  Clone ID: LIB190-031-Q1-E1-E10
ttccgggtgcacccacgcgtccgcacacgcgtccgtggaaaatacagaaaaacgattgcagcgttgctccagtttgtacgtcgttttatgttcgagaaagcctgctttgttgatatcgttgttacaaatattggaacagaattgtgatgagcaagtgattgatttatggaagacatatatacctaacttgtcgagaacactttcagaggactctccagaacttgtagagatagttgccaatcattctcccaaagtagcttcctttgtattggagctgttggatagtctgatggaaaatgggaaaaagccaagtccgcaagtactggaagctgctctcaagcattttcaggatgcttctcagcctttatgcgatgtgagatatgcaaatccttttatggagtccttttcc

SEQ ID NO: 1610 - DNA, 343 bp, Cyanidium caldarium
  Clone ID: LIB190-031-Q1-E1-E11
tccggggccacccacgcgtccgccaacgcgtccggtaattttttagcagtcacgtggattccttacactgtaaaaccgcaacgaaaagttttttgatcaatacagtacaatgtagaacaacaaaattatctgacaagcaccatttgttcaattttgcatctgctgtgaggagaacaactggagtttccaaagtaccaatacagtcttttggatatattttctcccttcaagaatacataaacaagtagcgaaaaaaacactatccgcaaaaaaaaacaggccactcacgtgccacagcggctgccacccaacctcacacgccccaccttcgttttttttttgg

SEQ ID NO: 1611 - DNA, 199 bp, Cyanidium caldarium
  Clone ID: LIB190-031-Q1-E1-E4
gcggacgcgtgggttggttttcttttcatcaacgcttcgttccgttactttttgtcgtgacaacttataatataaaatggccacaataatccctgtgtcgtcagcgggtgagctaactttaaccagacacatagcgggcggtaatgagcatggtacagcgtgttctatcgtagttcaccagtcgcatctcccagacact

SEQ ID NO: 1612 - DNA, 354 bp, Cyanidium caldarium
  Clone ID: LIB190-031-Q1-E1-E5
aattggtttcgaagcaaatcgtttgaggactatattagtgacttgaaactcaggggaaaggaacgtgaacgacaagcaaaaccttgtgaaacacaacaagtgagtagggtttttgtaatgtgtgtaaccctcaacgctgttagcgagaaagacgagcaacttaaactcaaaagagctatagagcagcacaactcggaaggagctcgcatttttgctcagaatgcaattagaaagatgacggaaagaatgaactacttagagtaagctccaagactggaccctgtcgctggtaagctgcagtccaccatcatagttcataccataagcaaagatattggacacacccgtgcgagc

SEQ ID NO: 1613 - DNA, 398 bp, Cyanidium caldarium
  Clone ID: LIB190-031-Q1-E1-E7
gaaatccgtcaggtatcctgtaagcttcactgcaagaagataggacacaggttattgcacttctaagtcaacttctgactaatcgagtgccaaaggaagcttaatgagatccatatagaggtctatcgtgttgactatcatgtgcgttgttattcgtgtgcttactcatgttttgacacaggtttggacaaatcgttgggcaaatcgttgttgcaaaagttgttggcttcacttgaggcatcccaagcgtcactcgtgggctctttagtggactcttttgcccacaagactttacgcaagatcatttgcacactgatttgtgcacagcacgatgagcactttaattcgcagttgatttcactactgatttctgtacagaatgttgtcgcagatgtaca

SEQ ID NO: 1614 - DNA, 446 bp, Cyanidium caldarium
  Clone ID: LIB190-031-Q1-E1-F10
gtggcggaaagacgacgaacttcaaatggtttgcttctgtttgtaggcttagaaggtttcaaccttgcatgtcagctatggaatattcgacagaatccttgtctggaatgttccactttggaccatatcttttgaaaaagtcggtcgaagttttctacgtgtccaaattgtcatacggtattgtcaacttgaagcctatagtgcctggtcacgtcctagttattccgaaaagagtagtaaagcgttttcaagagttgagtcccgaggaagttggcgatttatggcagtctgcacaacatataggtgtaaaactggaacaatattatcaagcccaagccatgactttttgtattcaggatggagaagctgccggacagacagttccacatgtacatgttcacgtgattcctcgaagaccgggagattttaaacgcaacgaccaaatg

SEQ ID NO: 1615 - DNA, 386 bp, Cyanidium caldarium
  Clone ID: LIB190-031-Q1-E1-F11
caaacgcgtccgcccacgcgtccgttttcctttggtacgatggatttgactggtgcttcagctgtttctcaacttgttggagcttcaagtcgtctatttttagcaagcgctcctgtagaaaagagcaattcaaaagctcttggtttattatccgcattaccatctcctttagacgaagttgctttgttcacctcggcggctggagtcgtgtttggtttcccctatttgactccaaaagggcccgatccaaagaaagacacttggtaccagagcatcaaaaagcctgtttggcaaccacccaattggttgtttccggcagtgtggatcccactcaaagttttacaaagcgttagtttgttcttgttatggaagaaagaaggagaatt

SEQ ID NO: 1616 - DNA, 433 bp, Cyanidium caldarium
  Clone ID: LIB190-031-Q1-E1-F5
cacacgcgtccgcaaagcctgaacgattccaagacggcgcagtaatcttgttctccacggtagctcgcctcgacagaaaaagacatgttgagctggctacaaaaaaaccacttgctagttgcaatattacaagtgtcaagaatgtttactctttatcgagtcacagtgcgtcccttcccctaatctttctttttcggtgtcgacgagtgcgtagacatgtcgtcttggtaacgcaaccctctattgacactctaggtttcctgtgcagcgtcgaactacctaaaacgcaaagcagcaaagtcccaaagtttcgactctttttgtttctcccactagccatattgaaccaaagtgttttgcaccacttgccacgacaacgaatggttcactctcgtgtgttttctcttgacagaactcgaagactatttatttc

SEQ ID NO: 1617 - DNA, 440 bp, Cyanidium caldarium
  Clone ID: LIB190-031-Q1-E1-F7
catggagaagcttggcaaagcctaagtagaaggaagaagaatagagaacaggcccaaagaagaagaaagaatagtggatgtcatagtatggcagaagaagaaagctctcaagtttttcacgccaaactattgctaaatcaaggctccaaagattggcttcgttcgttgggaaacttgctggaaacttttacaacggaagaggtaaaggtagcaattcggtagttgttcacgtagttcatgtgtaggatgaagaaaagttgagtactatatctcgtcacttggaacgcgatgctacagaaatatcgaggtcactgcaaaaatccaaagaagctgttgagagtatgcaagagtctttacaaaggatacaatcggaaagtgacttgattgcagcggttttacaaaaagtgacaaaagtaagaaaagacgtctagctccaagat

SEQ ID NO: 1618 - DNA, 383 bp, Cyanidium caldarium
  Clone ID: LIB190-031-Q1-E1-F9
aacatatcacagagaactacagagacagttggaaactacatttcaggagtttggaacagtatttcatatagactttcattccatgaagtctaaaggaaataagatgacaccggatatggatggttctcggaggccggatatggtagttgggaacttgagaggaaagagtgccggtccagagtttactgcggttgttgtggatactttgcaagacttgggatatcgagtttcattgaatgagccttatgcaggtgcagctattctaagaatgtatggaaatcctcgtcaagggcgtcatagtattcagattgaaatcaacagagagctttatttggatgaaaaaagagttcgaaagattcctggcaagtttgaacgtcttcgcg

SEQ ID NO: 1619 - DNA, 454 bp, Cyanidium caldarium
  Clone ID: LIB190-031-Q1-E1-G11
cccacgcgtccgcccacgcgtccgcggacgcgttggttctgggtgtctctcttgttttgctttttcaaagcttgaagactatttatttcctactattttttagaggcttctccagagattttttgtactagtcttattccatgcttcgtggtgggtgaatggctcctttgacaacagggttgtcaatttaccgccaatctccacagcttcaactgccaacttgtacgcgtatatatacatatatttgtacagattcgtggtgtaaaatgaagagtgcaatggttgaaaagtaacagtagagtactagtgtgcctgtagaggaagcacttgaaaagcggtcacgtccttgtacttgtctacaagtatttttttttgcttgtagagattgcaagtttagtgtactagacaaggtttccaagtatcattcgttgcctttaagcgcgtatgatgcacg

SEQ ID NO: 1620 - DNA, 207 bp, Cyanidium caldarium
  Clone ID: LIB190-031-Q1-E1-G12
cacgcgtccgcagacgcgtgggcggacgcgtgggcggacgcgtgggcggacgcgtgggcggacgcgtgggccgacgcgtgggcggacgcgtgggtttggaagttagtactattgcagcctttacgtggttgaactttggttttcactttatcgagggctatttgtctattttgacgaaatatgttggaaagcgcaagctaatccata

SEQ ID NO: 1621 - DNA, 451 bp, Cyanidium caldarium
  Clone ID: LIB190-031-Q1-E1-G4
gggtccacgcacgcgtccggatgacgatgctcaccttattatgtggctagaaaagtatcgtccaagcacctttgacgaagttctgtcacaaaaagatattatttctaccattttacgttttatcaactcctataaccttcctcatatgctcttttatgggcctcctggtaccgggaagacttcaactatattagcttgtgcaaaatatatgtatggaaacaacttcaggtccatggttttggagttgaatgcttcagatgatcggggaattgatgttgtaagaaacgagatcaaggacttttgtagcacacagaggatttttgccactggtgtgaagttagttatcctagacgaagcagatgctatgacaagtgctgctcaaatggcccttcgtcgcattatggaaaaatatacttccagcacaaggttctgtttgatttgtaactacgct

SEQ ID NO: 1622 - DNA, 431 bp, Cyanidium caldarium
  Clone ID: LIB190-031-Q1-E1-G6
agactagattggccgttgcaagcctttcaacgatatagtgtcaagttagccaagagaatgttatcctctcgatcagcgagagaaaatactttggctcctagaagtaatattcaaacaataggagttgtaggttgtggtcagatgggatcgggaatagctctggttgccgcacagtatgccggagccaaagtgttgctgtatgacagcaatccacaagtcagtgccaaagcattggaatatataaatactcaagtggaaaaggccgttcaaaaaaatcaacttaataaggaacagtcagcttccatcgtacaaagaataggacctgtcggcaacttggaagcactcaaggactgcgattttgttgtggaagcagtttccgaaaatttagccttgacacgggaaattttcaccaggttggaacaagtaactgc

SEQ ID NO: 1623 - DNA, 439 bp, Cyanidium caldarium
  Clone ID: LIB190-031-Q1-E1-G7
cacccacgcgaccgaaagacacgctttgtttggcttgactttattcgagttcctcgttgtcgaagagcagcagtctacggcattcttattatgatcgttcaacagttttcaggaatcaattctatcaattattatatgggaagtttgatgaacgaaactggattatccgcccagaatgcagtctatactagtatgattggtggtggcacaggattcctttcaactattcctgcaatatatctgatggaccgactgggacgtcgaccactgttacttactctcattggcggagtcgtggcaggtttatttattgttggcttttcattccttgcttccaatattcacaccagggaaggtatctacatttggggcgttgtcatcgactatcttttctggagttctgctctaggtccaactccttgggtggttgcttcagaaa

SEQ ID NO: 1624 - DNA, 372 bp, Cyanidium caldarium
  Clone ID: LIB190-031-Q1-E1-H10
cacgcgaccgcagatgtttattggagatggcgcgaagatggttcgagatgcctttgcccttgcaaaagagaaagctcctactattatatttatcgatgagttggatgcgataggaaccaaaagatttgactctgaactttctggagatcgtgaagttcaacgaacaatgttggaacttttgaatcagttggatgggttttcttccgatgataatattaaagttatagctgccacgaatcgagtggatatattagatcccgccttgatgcgctcgggtagaattgataggaagattgagtttcctttaccggatgaaagttctcgagctcgtatacttcaaattcattcaagaaagatgaatgttcatcctgt

SEQ ID NO: 1625 - DNA, 255 bp, Cyanidium caldarium
  unsure at all n locations
  Clone ID: LIB190-031-Q1-E1-H12
ggtccaccacgcgaccgaaaaagcccagaagccaagataaggtatcaaagtaaagaaagaaggaaaaggagaagaagagagggtacgcttagaagcagcaaaccagagaggaaagcgttaaagcatgaaagaaaagaaatccgaaaaagaagagaaaaaggtaagaaagaggaccgaattaaggtaagaggtacangagcaagaagagaagagagaatgctgggtggagtagcgaaacaagagaagggaagtaaa

SEQ ID NO: 1626 - DNA, 450 bp, Cyanidium caldarium
  Clone ID: LIB190-031-Q1-E1-H4
gggtccagcacgcgtccggagaaatgcgtcccactccttgaatgtatctcaaagagtcgtttcatgacgatttttttggagagaaagcagacgttggtgaaattttctgtcaattttcatacttttagtccaaagacttttttgccactcgaagagcatatttcgcgtccctggctagaacagctttttccactgaactattttcaggacgaggagggccacgctcgtgcgacctggtaacagttttcttggacacacgacgattgcgtacaaatcagctttttgtgaagagagagaattgaatatttttttggaggcgaggaactttttacttctgcgctgttcgcaggtgcactcatgaacctccttgtgttctttttctagacttggagaaaagcgagtttattttctgttgacagctttagtggaacaactggaatttgcgactct

SEQ ID NO: 1627 - DNA, 316 bp, Cyanidium caldarium
  Clone ID: LIB190-031-Q1-E1-H9
acgcgaccgcagcgcgtccgcccacgcgtccgcccacgcgtcagtcgaactaatataaaataactagtcttctcaggtttttacaacacaataaagatacgtataaatacaaatcacagggcgggggcccccccccacacccgccccacagggcgggggccccacccacccctccccccccccccacccccccacctccgcctccccccccgcttcccgccccaccgccccccgtcctaccccggcgcgcccccgtcgccccccgcccctcccccaccctcccccccccccccccccccgccccctcccccccccg

SEQ ID NO: 1628 - DNA, 263 bp, Cyanidium caldarium
  Clone ID: LIB190-032-Q1-E1-A1
tacgggaaagcagtacaagaagacagagaaaggaaaaaactgagtatcaggaagaaaagagggagtagatgaggaaagaaagatcaaggaagtaagagtaagagaaggagtaatgtgaatgaaacaggaaagtattgaagaaagagtgtaacgcgtacttgcataagtccacagtgaaagacaaagaagaaaaatacagaaacccacatttcatcgcaacgataggacaacggaaaatgaaagaaggaagacaacaaacgacc

SEQ ID NO: 1629 - DNA, 316 bp, Cyanidium caldarium
  unsure at all n locations
  Clone ID: LIB190-032-Q1-E1-A3
acgcgtccccggacgcatgggatacgggaaagcagtanaagaagaaagagaaaggaaaaaactgagtatcaggaagaaaagagggagtagatgaggaaagaaagatcaaggaagtaagagtaagagaacgagtaatgtgaatgaaagcaagaaagtatttgaagaagagagtgtaaagcgcgtaccttttgcataatgtcccagcgagtgaaagaagaagcanaaagaaagaaaaagaagtagccaggtaagacccgaagctagttgatcttatgctgtccaagcgaagtaaggctgaaacagtatctgtggaaaa

SEQ ID NO: 1630 - DNA, 605 bp, Cyanidium caldarium
  unsure at all n locations
  Clone ID: LIB190-032-Q1-E1-A5
cacgcgtcggcgccttaagggattggagtggcttattctatggcttttgctttgcgtggtctagcgagtctttcaagtcgtttgagtacttggaaacagggttacaagattgtaactgttgcaaataattttgaacgagaaagaggactgcgactggtgagttccttccaaagtgcgcggcagtggacttcgttgcaaggtttgttatgtcgctatagaagtgacagcgttgtggagggagggaaaaagcaaaagggagtcgctactgaaagaagtccggtttctacagccattcccatgggttatgccgatgaatatttccatcacgtgcatcgttggcgtccaggagatccaagtaaacgaacggtagtctatttgtggttgggaactgccaagtttatcactgcttgtattgctcgagtaataatcctatgcttcatatatactatgatgccttctgcagatgtactggcagaggcatccacagaagttagtttagacagtattcctgaaggaacaactgtttcagtgaaatggaaaagaaagccggtatttataagacatcgtacagacggagatattganaaggcaagacatgatgataa

SEQ ID NO: 1631 - DNA, 255 bp, Cyanidium caldarium
  unsure at all n locations
  Clone ID: LIB190-032-Q1-E1-B1
ggatcacgtaaattaatccgataaaccgagaaccttacctcctcacaaaaaggtgttgcacggctgtccaaaagaacttgctgtgaaagtgagaagaacgtacgagaaaagccaagttgaggaaaagaaggcaagtanaagggcggcccgagaaaagaaagggcgtaagacgtgatacagagtaggaagaaaagagaagagagctagaaaggaggtaaaagaagagtaaaaggactagaagacgtacggaattca

SEQ ID NO: 1632 - DNA, 351 bp, Cyanidium caldarium
  unsure at all n locations
  Clone ID: LIB190-032-Q1-E1-B2
ccacacgtccggcacgcggtggcaaatttcattcattctatttatagccacttttgcaacttgacagttttgtagttcgaagataatggcagttaggcaatgtttgcttattttcatatgtctttcagctctgttaggttcaactttggctgcttctggtgcaacgtctatttactcgttgcttcagagtaaaagagactatacttttacagtccaaagcatagagctggctaatctaacagacgtatacaacagcagtgtattggactttaccttccttgcttccaatgacactgcttggaaacaatccagagccaatgtcactggtgcacttagtgcagcanaacaaaa

SEQ ID NO: 1633 - DNA, 297 bp, Cyanidium caldarium
  Clone ID: LIB190-032-Q1-E1-B3
accacatgtcgggactggagaccgcctggtacagtcgtcatcgatgttggaatcaattccgttccagactcctcgaagaaaagtggatatcgattggttggtgatgttgactttgatgattgcaaggacgtttgcagcatgattacaccggttcctggcggtactggcccaatgactagtgctatgttgttgagaaactgttgtgacggtgccaaagaagcatttgggcttgcctagagaaaaacatcccagatttcgatattaccaccaaggtcggtgctttaaaagtgtccatgc

SEQ ID NO: 1634 - DNA, 271 bp, Cyanidium caldarium
  unsure at all n locations
  Clone ID: LIB190-032-Q1-E1-B4
tcggcaaacagcatgtctactggaagaacactagaccgtggattggaaggttagcagtgaatattcaaaaggtggcaactcttctcaagaagggggttcatctcctaaattgggtagcagtccttcaaaactaagcaaaagtcctcgcgctcaagaagtttggagtaaaacagtgcatccttgggggcgttcttactcaggaaaaaaacgttatgacaccgtggagaaagacacanagaaagaacaagtatatttgagatacatgatctgt

SEQ ID NO: 1635 - DNA, 412 bp, Cyanidium caldarium
  Clone ID: LIB190-032-Q1-E1-B6
cgggtatgaccacgcgtcggcgcgacgcgtggagcggacgacatgggttgagaagtttcttttccaacttggtggagaaacaagatggcatgatctggagttttttctggaagatgtctgtactgcacttgcttgtttattttcttagaaattcagcggcttgaaagataaagttgaagacacttccagtactgttggtatggaagatggtgacaacagtcggtggcaacaagcgttacttgaaagtttgcgtcatagttgggaacctcctagagaatgcgccacacatgatgacgttattgagattacttctttggagagactgtacagagtctttgaaagatgctaactcttttcgcatttttttttcgatatccagtatcgtgataaacgtttcttagtcaagaagatc

SEQ ID NO: 1636 - DNA, 125 bp, Cyanidium caldarium
  Clone ID: LIB190-032-Q1-E1-B8
gtcgcctccttgtgtgtcgtgcaaagagccgcataaactctatgactcatactaccgacttttactgggcactacgcatagatcaactgtgtcttaccatctacgttccaacgttgacccatccc

SEQ ID NO: 1637 - DNA, 175 bp, Cyanidium caldarium
  Clone ID: LIB190-032-Q1-E1-C1
gcaaaggttaaaacggttttaaatattccattgaaatcagatgacggaaaaaatggcattcttatatcatcattaaaaaaggctgaagaaaggaacgctttgatccttcgcgtttatgaaccacttggtcgccactgcactggcattattcgactcgctcagcagtaacctgtgg

SEQ ID NO: 1638 - DNA, 276 bp, Cyanidium caldarium
  Clone ID: LIB190-032-Q1-E1-C2
ccacacgtccgcccacgcgtccgcaagtggatgaaagatactgcattttcagaaagagagtggcaaattgaaaagacggatcagttaaagccaatagctcaagaactgggttgtagtgtggctcagctggccatagcttggtgtgcagccaatcctaacgtctccaccgttatcacaggagctactaggttggaacagctggaagaaaatttcaaggcagtgagtattgttcctaaattgacacccgaagtcatgagcagaattgataaaattgca

SEQ ID NO: 1639 - DNA, 317 bp, Cyanidium caldarium
  unsure at all n locations
  Clone ID: LIB190-032-Q1-E1-C3
acgcgtccgccacgcatccgccacgcgtcngccacgcgtccggaaaatgttaagttggttgggtcgttggtgggacagtcatgtagtagaaatggctttagacaatgttaaaaatgagcagatggaaagaatccgcaagacaattatttcaagggtaccagacgttcctaccgtggttgaaattggagcaagctcaagtctcaatttcctgcactacccttcttatgtgaaggatttgacagttattactttacaagaagaactcagcanaagagctcgacaanaagcacaacagagaagtctgaatgtgcatcata

SEQ ID NO: 1640 - DNA, 196 bp, Cyanidium caldarium
  Clone ID: LIB190-032-Q1-E1-C5
ggcctaagtgatatccttgagaacttactgtaggaagacgtcaacgtagcctacctttgcatatcataaaccttggtcgtagagacggagcgtatatatctggatcaagtcgacgagcttctctttctgctttcgtctttgccgtcctcatgagcgtggaacgaccgccagtatagtactatacggctggccgagg

SEQ ID NO: 1641 - DNA, 249 bp, Cyanidium caldarium
  Clone ID: LIB190-032-Q1-E1-C6
ggaattccgggacgaccacgcgtcggggatcattccacgttggtaaagatagacttgtctcaaggcagctttaaagtactccaagactgtgacaaagatttagaatgtgatcataataccaagtttcagttggaacttattcagtatggtctcttttcacctggtttttggacgagagaaaatgttctgctcttctatttggagctcgtgtcaggtgtattcataagggaactctctacttttcacaca

SEQ ID NO: 1642 - DNA, 596 bp, Cyanidium caldarium
  unsure at all n locations
  Clone ID: LIB190-032-Q1-E1-C7
accacgcgtccgcaaactgtagaacagaagacttgctacaagacagtagcagttcctacagagtatcagaaatattgttacaagcaagtggaacaggagcaagttgttcaaaagagctgtcccacttattattcagtacaaaaggtgaaatatcagagctgccctacttatatcacgcagccaactatcatacccaagtactgcagtatgtcggtctctgaagagtatgtacagcaacagcaatgtgtaaagtatgtggctcaacaagttatcgcacccaaacaatgtgtcaagtactataccgagcagaagattcaacaaaagtattgctctcgctatgttactgaagaagaagtacaaagcaagcagtgcatcaagtatgtatctcttcagaagatcaagtacgagtcttgctctgctcaatatgaagttcaaaagatcaagcagcaacaatgtactatgacagtctctgaacaatacatacagcccgatacttgctacaggtatgtcnctgaacaacatttggtgcctcatacttgttacaggtattattctgtacccaagtttattgaaaagtgctatcctcagtatgcaac

SEQ ID NO: 1643 - DNA, 247 bp, Cyanidium caldarium
  unsure at all n locations
  Clone ID: LIB190-032-Q1-E1-D3
cgtcggcccacgcgtccgagcanatactgagaactggaagaacgtttgtcagatggagtccaattggtatccttggtactaacgctgtgtgtncccagtaatagctgctcttttatgggagcttactttgagaatttaactttttgtcaagaaagaattcatacactttgttgtagtctggaatggactgaagcgtgttgtgttattgtttgtaacaagtacaagaataatacgtactcttatttct

SEQ ID NO: 1644 - DNA, 363 bp, Cyanidium caldarium
  unsure at all n locations
  Clone ID: LIB190-032-Q1-E1-D4
cggcagaaatggcgacctcttatggtgttgtcgactccttgaacacgaggaaaaaaatgctccttgtccggaaccagagaaagaagaagaaactgccaaagtaaaaacaacgaatgaagatgaaagtgatgacatcgcttgtgcaacctgttttgagttgttggtgcctgnggatggggttcttgaactgccgtgttcgcatctatttcatagtgactgtatcgtacagtggctactanaccaccaacactgtcccatttgtcgtactttgctgccaccttttgactttcacggtcagtttgtttcttctcancaaaacggacacttgatacaagtgggagaaaacggtactcaagaacgtcc

SEQ ID NO: 1645 - DNA, 522 bp, Cyanidium caldarium
  unsure at all n locations
  Clone ID: LIB190-032-Q1-E1-D5
cgggatcaccacgcgtcggcggacgcgtgggcggacgcagtggggtcagtgtaaagtttgtcgacacaaaagtagctttgtacgatatgctggaaatttgtcgaaagcaaagtgtacagcagcggtgcaagagcctttgtcgtttgaacctagctcagtaaattctcatgttggtataaaggaggaacttgcgataggtttagaactaccttgtggtgcaaaaaggttggaggatgcaccttgtggagatggtgccaactgtccttttgtaagatatcaatgtaaaaggtacttggccgttataccaacctgtgtttccaactaacgtgtgacattgcattagaggtcatattataaaagctataaaaggaagtcctgtntgtaaagcttgtcctttatgtaaatatgacgctgaagctgaactttgtccggaacttcgtcgatggtcaaggaaacgtttatctgtagaaacgatgcagagaatagcttcccgaacggggtggtacctgtctatcaaccttt

SEQ ID NO: 1646 - DNA, 451 bp, Cyanidium caldarium
  Clone ID: LIB190-032-Q1-E1-D6
cgggatcaccacgcgtcgggctttgttgtgctgagcgagaggcaaggtgttatcatggcaaaggcagtgagaattggtgctgaaggttacaggttaaagttggacggtgcagttcaagagatagacggtcgttctgtagttctggtagatgtggatagtattacccctctcatgtttggaggtagtatgaaagaaaacgccaaattgttggatgccaagtttctaacgaagtattatgatgagaacaatgacttcttcttcttgtcgactagagaagagaagacaatgtctgtgacgttgcaacttgccagcgaatatgcagagctggtagatgaccaattcgtgaacggcttcttcgagaatgctctggagtccgctcagaagacgtcttaatttgtcaagtagagtgtactgtgcgtaattctgtgtgtagttgtctctgtgtgtgtgt

SEQ ID NO: 1647 - DNA, 384 bp, Cyanidium caldarium
  Clone ID: LIB190-032-Q1-E1-D7
cgggatcgaccacgcgtcggactagaaagagtgaggagtggaaaaaacttggtttccagggattggatccttgtacagactttagaggaggtggtttactggcattgcagcaacttgtatattttgcagaaacgagaagagagttggctttacaaatgttgaaagaagcgagtgacagttatccttttgcttgtgttggtattcattgtaccgcagctattgtgcaacttgtccatgaagactatttggatatgttgttgtatgcgtgttccgaagaacaagccttcaaagtcatccacgaaagatattgtgaactgtggataggttttcatcgcagttggaagaatcagacctgggaagatagcatgtcgtttcaaatctgtg

SEQ ID NO: 1648 - DNA, 234 bp, Cyanidium caldarium
  unsure at all n locations
  Clone ID: LIB190-032-Q1-E1-D8
ggaattccgggatcaccacgcgtcggcttgattccaattggcaaggcgaagatcatgcgtgaaggaaaacaccttacaatggtttcattttctaaattagttggcttttgtttgcaagttgcagataaattagcatcagagggtatagaatgtgaagtcatcaatcttcgttcgattcgacctatggatangggaactatcatccgttcagtgaaaaagatcatcgtcttgtac

SEQ ID NO: 1649 - DNA, 217 bp, Cyanidium caldarium
  Clone ID: LIB190-032-Q1-E1-E1
taacctaaattggatggaaccaatccaaaattggccaataataaccttattaattcccccttttggttggttaaccgttggccaaatttgggtggtttcctgggaacaattggtcaatccacaaccaccaattgcaaaaggaaggaaggaagaatcctccaagaaagaaacccacagttaaacttgaacaaccaaatgcaacaaaaacaacagaaaa

SEQ ID NO: 1650 - DNA, 367 bp, Cyanidium caldarium
  Clone ID: LIB190-032-Q1-E1-E3
tcactacgaggtttagttttcagttgtggtgaagactttgtttagcgacttgtgtgcaaaaaatggtcaacttgttgtatactgatgagggacgaaacctgttaaaacgttaccaactcattttatatgttgctatgttggctttctctgccactattttggggcttatggggaatcccatgtttaatctctatctaattgccaatgaatatatacacccggatcctagcgaaccttttgtacccattgacacagtgaagaacgtcactttctacaagtctctctccttctgtgcctggggtgtcacacgagatcgtacacgtggcatgcattccacttgccgatgggtcattgccctagcttctgt

SEQ ID NO: 1651 - DNA, 150 bp, Cyanidium caldarium
  Clone ID: LIB190-032-Q1-E1-E5
cgcgtcggccacgcgtcagctcacgcatccgcccacgcgtccgatttatagataaaatgagtaatcagatcgcgtctatgaatgagcgtttcagtcaactttcgagtttgtcggaatgcataggacccctggtcccaacgaacgttcacg

SEQ ID NO: 1652 - DNA, 309 bp, Cyanidium caldarium
  Clone ID: LIB190-032-Q1-E1-E6
attgggtgttgggcgacagtagaggaacggtttccacgtatacttgtaggaaccaggactgtagtaactggcttgagcaaggtgtttgttcaagtatagttattgtagttgtagagggttgttgaaataaaggggacgagttgtgagacttaaattcctatctaccgtaaccgagggacgaaggtgtctttctgacagtggacttcagtggccgcagtgtctcaagttttcgggttggttccgtccaagtaaccgcactgctcgtacaacggcaattcctctcacctgtcaccgccacgtccaaacccc

SEQ ID NO: 1653 - DNA, 371 bp, Cyanidium caldarium
  Clone ID: LIB190-032-Q1-E1-F1
cgggcttggttgtggaattggaatcattcaacttcgtggtggtggtggtgcctttggtggtccttgtggtaaacctaaaccactaataactaaaatggttcagccaataattgggaaaatccacctccaaatttatggaaaaggaattctcaattgtcaatccggtttggcaaattcgggcctaatagaaaattacggttaaaccattggtaaaaaattttccggcaacaaacccaattccattgaatccaaaaatttcaattaaaaaaaccaaccagaattgcaaaacctcctttccggtaaaaaagttcccgtaataatcctccttcgaaaaactttggcaaacattaaaataatttcaaactttgttt

SEQ ID NO: 1654 - DNA, 174 bp, Cyanidium caldarium
  unsure at all n locations
  Clone ID: LIB190-032-Q1-E1-F3
ccacacgtcggcccacgcgtccgggagagagagagagacagacagatggccaacgctggtcaagatggccttgtgcaagtcaacanacatagaaaagtaaagagattgcaagaagataatattttgaatagagcatacacaaccagagagtattctgtctttgaaatcattgtg

SEQ ID NO: 1655 - DNA, 628 bp, Cyanidium caldarium
  unsure at all n locations
  Clone ID: LIB190-032-Q1-E1-F6
ggaattccggaatcaccacgcgtcggcccacgcgtccgggatggagtatccagacaagttgctgccttttgtgcaggttgtgaaaaagtcttatctcctacgagttggttacaatttttaccggaagagtttgagtctctgttgtgtggtcctaattttgaaagatgggagatgagtagtttgattgctgctaccaaatgcgatcatggatacactcatgaaagtcctgctgttcaatatttgtttcaagttctctcgacttataatttggaagagcaacgaatgtttctcacgtttgtgacgggcactccacgactccctgttggagggttggcagcgttgaatcctcgtttgactattgtaaagcggacaccggaagcaggtcgaagtccggatgagtgtctacctactgtgatgacttgtaccaattacttgaaacttccgcaatactcttcttatgaaattaccaaggaacgattggaatatgctattcgagagggtcaaggaagttttcatttatcttgatggtgaatacttgtaggtcccattggtanagactttacatgcaatatatatatatatatacgtacatatatatataatgggtgtgtgtgtgtgtgtgacacac

SEQ ID NO: 1656 - DNA, 475 bp, Cyanidium caldarium
  Clone ID: LIB190-032-Q1-E1-F8
acgcgtccgcccacgcgtcagggggcaaggtgtgtttgtgtgattggttggtagaaaggcgcctattttcaaagagtccaacctagtgagaaaacatgaatccggaatatgactaccttttcaagttgttgctgataggcgactctggagtgggaaagtcttgcctcttgttgcgttttgccgacgacacttacaacgagagttatatatcgacgattggagtagactttaaaattcgcacgatagaactggatggaaagaccgtcaagcttcaaatatgggataccgctggacaagaacgtttccgcactatcacttcttcatactatcgaagtgcacacggcatcattaatgtgtatgacgttactgagcaggaatcgttcaacaatgtcaagaactggttgcacgaaattgatagatatgcgaatgagagtgtgaacaaacttttggttggcaacaagaatgacttgacgac

SEQ ID NO: 1657 - DNA, 167 bp, Cyanidium caldarium
  Clone ID: LIB190-032-Q1-E1-G1
atggtttgggtggccgctttggccgtcaagaaaaggacttggtataaccaatattaaccaaaatggcaaaaattaaaattcatacaaacaacaacaaatccaataaacccaataaaaccggtatcaagcaacttcaaaagaaccggttccaaggaaaaaaggggttg

SEQ ID NO: 1658 - DNA, 373 bp, Cyanidium caldarium
  unsure at all n locations
  Clone ID: LIB190-032-Q1-E1-G3
ggaatcaccgccgatggaacagatgtgtttgttcctttcaagattttattacctcttgtcaaaccaaaggatatcgttttaagcggttgggatatctccggctataacttggcaaaaactatggattcagcgcaaatcctggaaccagatttgaagaaaaacttagaccatatctagcagatatgaaaccgcttcctggaatatttgatgaacagtttatcgcaaagaatcagttgcctcgtgcggataacgtcatanaaacaagtgacaaagcacagcangtttgaaattatcgacaagacattcganagttaagcaacaacatcagttggactttgttgttgtagtttggactgcaaactctgaacgctac

SEQ ID NO: 1659 - DNA, 228 bp, Cyanidium caldarium
  Clone ID: LIB190-032-Q1-E1-G4
ccaacgtcgtcgagcctgggcctacgattgcctgccttctccacatcgtggttgtccttgaaacacgtttagacagattcaaatggctgcagtaacttttacgagacagaatactgatgtaccgggtatctcatacggagaaaatgctcccaacaactttggagttattgttgtccacgagtggtggggtttgaacgaactgatcaaaatacgagcacaagagctgag

SEQ ID NO: 1660 - DNA, 120 bp, Cyanidium caldarium
  Clone ID: LIB190-032-Q1-E1-G6
catacatattttgtggtttcgataagtggttgtctaggtcgacatgtatgatcaaccgtagcgctatctgaagccttttgatctgcctacattattgggggataaatgagtgttacacgg

SEQ ID NO: 1661 - DNA, 121 bp, Cyanidium caldarium
  Clone ID: LIB190-032-Q1-E1-G7
cgcgtggaacagggagaggatcaggatctcacttatggaagacgctaagcacgttatatccaactgtgaactacaaagactagcagatgatgtacaacttgacgatcaagttgtacaggta

SEQ ID NO: 1662 - DNA, 247 bp, Cyanidium caldarium
  unsure at all n locations
  Clone ID: LIB190-032-Q1-E1-G8
aaatagaggaaagcaatanaagaagaaagagaaaggaaaaaactgagtatcaggaagaaaagagggagtagatgaggaaagaaagatcaaggaagtaagagtaagagaaggagtaatgtgaatgaaagcaggaaagtatttgaagaagagagtgtaaagcgcgtaccttttgcaaaatgtcccagcgagtgaaagaggaagcacaacgacaagaaagactagcaggtaagaccgaactagtgatcta

SEQ ID NO: 1663 - DNA, 347 bp, Cyanidium caldarium
  Clone ID: LIB190-032-Q1-E1-H3
gagcagaatgagcataccactcgagaattggagttatcttcatcaagggtagctatattgaaaaacaagttaaagttggtacagcgaagttgggaagtagatttcagtgagattaacaaattagaaaagattggattcggtgcctattcagaactatttaaagcagaatggaaaaggaccattgtagctgttaagttgatgaaagctcaagaaacttccggaaaagtcctgcgtcagtttcactaacaagtgaatacactttccaagttgacacatccgaataatggtttaattaagggcccctggtgaaagccaacaaatgtctcaataataacggaatttggttt

SEQ ID NO: 1664 - DNA, 289 bp, Cyanidium caldarium
  unsure at all n locations
  Clone ID: LIB190-032-Q1-E1-H6
gagttgcacaaaagttaagcttttcgcatataagtttgggagaacagtttcgattagaaagtaagcataatagttggcttcgttctatccttgaagaaggaaaattgctacctgatgactttgtgctgaagcggctattaagtatgattgaaagttcgtcttccaactatcgaggttttaatctcgatggctttccaagaacactcgnacaggctgtatcgttgaacaatttgtatgaagtggatgctgtttatcgtcttaccttgcgtgaagacattttaattcaaaa

SEQ ID NO: 1665 - DNA, 137 bp, Cyanidium caldarium
  Clone ID: LIB190-032-Q1-E1-H8
cattcaacgataccttcaactccaagtgatttacatcgtaaacacccatatactcatggaatacgcttggtatctcgcacaaggatcacactgacactcaagtgcacgtcacgtcgtgcgacgaccgatccgatgac

SEQ ID NO: 1666 - DNA, 432 bp, Cyanidium caldarium
  unsure at all n locations
  Clone ID: LIB190-033-Q1-E1-A1
ggaattccgggacgaccacgcgtcggacagcttatgagaatgccaaggctttggcacttgctggtgaattggagtcttctggagttgtggttcanagcataactcctttcttcattacgagtgaaatgagcaagatacgcaaatccagtttggcagttccttcagctgagcgatttgctcgagatagtttaaagagtgttggatatgaagtgtcttgcaatccttattggtttcatgaattccttgcactagttatttcctatttacctttgaaactacagattcgctatgtagccaagttacatcgtggccttcgtgaaaaaggattgcgaaagatgtcttctgcagaaaagaagagtaaaatatgatgtggtgaataatccttggagaaattttgtctatatatataaatttacccttttttttgtattc

SEQ ID NO: 1667 - DNA, 245 bp, Cyanidium caldarium
  Clone ID: LIB190-033-Q1-E1-A2
ccaagcgtcggtcttcattcaccggctgtaacgagcatcgaatttttgaaaaagaaaatggaaggcttcaaaaagtctggtattcctttggaacgcttatggattaatccagactgtggattgaaaacgagacaatgggaagaagttattccttccttgagaaatatggtggatgttgctgtgcaattgcgcaattctgcaaagaatggaatataaacttcaataaactgttgttgttgttgtgg

SEQ ID NO: 1668 - DNA, 375 bp, Cyanidium caldarium
  unsure at all n locations
  Clone ID: LIB190-033-Q1-E1-A3
ccgatcgagttcgatcgtcctcatgtcgaatgtttcgaaatcaatacgataccgatgttactacttttagtcctcaaggaagacttcacaagatagaatatgcccaagaagcagtaaaacagggaagtgcagtagtaggagtacgacacaagaactatgctgtgttggctactctgaaaagaaccacttcagaccttgcttccactcaaaagaaactatttcgcatagacgatcacatanggatggctattgctggtttaacagcagacgctagattgctctctaaatatatgagaaccgaatgcctcaattataaatatgtatatgagtgtcctatgcctctttcccgtntggtgcttcgtgtcgcggataaac

SEQ ID NO: 1669 - DNA, 408 bp, Cyanidium caldarium
  unsure at all n locations
  Clone ID: LIB190-033-Q1-E1-A4
gaccacgcgtccgcccacgcgtccgcncacgcatccgccacacgcgtccgctcacgtcgccagtcatcaattctccaaaattgcgaaaagcataaatataaaagatgaccaagtgccttgttgatgactaaaattagttgggtaagcaaggcaatgaagtagtcaaatttacaaagtattcttagatcttagaatattgtgtaaagtcgtttttactgaaaagctcacaaccaatttttcctcaaatttgactctaagtcgatacctaatgtatagaattccgagagtaatggaaatttaaacaattgcgatggataaagtcagatgttacgtaatctgagagagagagagagaatgaatacaaggcaaaagaatatcagcatttaactgtgtccaagtacaagctat

SEQ ID NO: 1670 - DNA, 448 bp, Cyanidium caldarium
  Clone ID: LIB190-033-Q1-E1-A5
aaacctttcctttgttattggagcctactcaagtagaaactatagaaacagaatataacaaggaatttatcttgcgcatgattcctagactagattggaacctggttcgacaagtaagtaaacagtttgcgtttggtgaactgccaccagtagctccccacaacgacacaacggatgaagaaactttacgattgcttcacaagttgctattggagacgcatatcaaggaaggagttctcaagagtcaagatggaactatttatccgataaaagatggcattccaaatatgctcataacacaagtcaaccatgacgagtaaagaaaaatagatatttggttattttcaaaaaaaacttttttggtggagtttatgctgatattgatcccaaaagcaatttcatcttttgatacacttctcgatgaatttcctgggtgcgcgattcttgg

SEQ ID NO: 1671 - DNA, 432 bp, Cyanidium caldarium
  unsure at all n locations
  Clone ID: LIB190-033-Q1-E1-A8
ccacgcgtcgcgccgaatacaagattagttgatagttatttagggttggtgaacactgcttctgcaggtttattcggttatgataaagaacaagcgagaacgggaggttggagagttcctgaaaaggttctttgttccactgccttggttggtggttggttgggaggttttgtggctatgaaaaagtttcaccataagacaaagaaacagagctttcttcaaaagtattatgcctgtgttgcagcaaatgtangaatgataggattggttgcagcaacaacaaagcttcgtggacacttgcaacgtcttttgcgtagatgaatgtgagagagagagaagatgtatgcttttcgttcaaagaatagtgtatcttgatctttttattcgacaagtcattatacanaatcaacaacaaagcgcttctttcgtttc

SEQ ID NO: 1672 - DNA, 400 bp, Cyanidium caldarium
  unsure at all n locations
  Clone ID: LIB190-033-Q1-E1-A9
tacggtcggatatccgggtccaccacgcgtccgcacacgcgtccgcgcagcgtttgcaatttttgttgtgtgtgagtagtgtcatggcagagcaacaaagaagtgagagtactgaagttagaagtgctgcagttcccaccccttgtataaagggttgtgggttttatggtacctcttccactcttgacatgtgctccaagtgttatagagaacatttgcgccaagaggaacaaagacttcaagtggagtctgtatgtcagcagcaacaacaacaacaacaacaaaagcaggataaggaacaagaaatgactcaggggtccgagttgcacgacttgccctctaaaaaggagcaaggggaagagacgtcngtggaagtggctcaacctagccagggttttgt

SEQ ID NO: 1673 - DNA, 232 bp, Cyanidium caldarium
  unsure at all n locations
  Clone ID: LIB190-033-Q1-E1-B1
gtcggactgaactcttttanaggatatgattgttcatgtcacacgggagctatattttgggccactctangcttggattgtgctatatcgttgttttctattttatgtgcagttgcattgtanatggatacggatataaatataaatatgcatatacacatattgatacataagagtgtatttatgtgtgtgtgtgtgtgtagtcttgcaaataaatagtattcttgtggtg

SEQ ID NO: 1674 - DNA, 405 bp, Cyanidium caldarium
  unsure at all n locations
  Clone ID: LIB190-033-Q1-E1-B11
cagacgcgtgggtgaaaggagggtcgacgagctcagcttgaagaacaaagaacttgcgtggggttggacgttatttatgaacttggactctattgacacaggaattaatgctccttttgacccgtttgcagacgcctcacgtggagaggacgcagcagtaaccaaaaatatagtgcatattcgcttgcaacaaagaaacggccgcaagtgcttgacgacgattcaagggcttgacacaaaattggatttgaataaaattacaaaggccttcaaaaaggagttttgttgcaacggttgtgtcgtagacgacgcagaactgggaagagtcatccaactgcaaggagaccagagggataaagtcaaaaagtttctagttcaggagaaatttnctgaaaaagacctgat

SEQ ID NO: 1675 - DNA, 396 bp, Cyanidium caldarium
  unsure at all n locations
  Clone ID: LIB190-033-Q1-E1-B2
ccgggtacaccaagcgtccgcgcgacgcgtgggcggacgcatgggcacacacacatagagagagaatggcattgtccacagtatctcaatggctagtattaggatatacacttttattaatgttgggaggacttgtangatatgtcaaagcgggtagtgttccttccctcgttgccagtttacttagcggttttattttactttatggagtatatttatccaactggaagatttgtttcctaacgctcatcctgttgtgtgcggttttcctatggcgatggtcaaaaacaggcaaaataatgcctgctgtaccattagcgtgtttgacagctgtaacttgtttccttttgtggttgttggagaataataaagctacttgaggtttttcnaaganaa

SEQ ID NO: 1676 - DNA, 440 bp, Cyanidium caldarium
  unsure at all n locations
  Clone ID: LIB190-033-Q1-E1-B3
gtcggcacacacacatatatatatatatatatagatggatagatagatggatagagagagactaacttgtgtatatagacaggagcaattatcaacggccaacgtgtggatgcaactcttcctaccatcaaatatatattagaaaaaggagcacaaagcatcgtacttctttcccatttgggtcgaccagaaggaaaagtggacaaaaagtattcgttaaaacccgtagcggaatatttacaacagcggttgggtcgaccggtcgtctttctggaagactgtgtggggcctcaagtagagcaagcttgtaaagaaccggcgcctggatctatctttctatgtgaaaacttacgtgtccatgtataagaagaaggaaaaggagtagatgangaaagaaagatcaacgaagtaagagtaatagaaagagtaatgtgaatgaa

SEQ ID NO: 1677 - DNA, 545 bp, Cyanidium caldarium
  unsure at all n locations
  Clone ID: LIB190-033-Q1-E1-B5
cgcgtcggcccacgcgtcagcccacgcagtccgagcggattcaaatttgggatctctttcagtttattcggacccaatgaattattttggaaaaaatcggaagtttcgagttccagacccaatcctgagtccatctttggagtctcagattaaacgacggcctcaaaagaaaaaacagtattcacgtgcgtctcncgcgaagttttgtcacctttgtgctcgtgctgccagtaagaatatcagaatggtggtttgttcgaatatacgaattggcatgtgtctcaaagttacctgtgaaaagtgctttcggcagaacagttggaattttgaagaagcctttgaaaatccagactcgtggatatgcactcattgtcgtggttcgtgtccttatcgtgcacaatgttctcatctatcaacgtactaatcatcgaagacgagttagccgttttctcatgaaaaagcagaaagaattgaacgatgagtacgttgagacaagaagctgacgataaaagacgacattgtttagaattcagttttgaaggtta

SEQ ID NO: 1678 - DNA, 250 bp, Cyanidium caldarium
  Clone ID: LIB190-033-Q1-E1-C1
actcgcacgctcgccacgcacgaatgggctaacataagatcaagacaataaaacttgaagctcatataagaaacattacatgcatctcaccacaacacatatgtaatgataacacatagacgaaaccaaatctacaatagttagagaaaatctaataagaggggtaaaataaacatcatagatagaacactataagaaaactaacatttgcgggaataacagaaataatagcacaagataaaataataca

SEQ ID NO: 1679 - DNA, 243 bp, Cyanidium caldarium
  Clone ID: LIB190-033-Q1-E1-C12
ctgctcacgcgtccgctcatgcgtcagctcaagcatccgctcacgcttcagctcacgcgtcggcgcacgcgtgggtcacttcacaacttttattgatacacacctcgaggggcatgtatatttcaactctgcataattcacgggccttaatgacttctcgtctcaaccgcaatccacttcggctcacctagcttctccactttccatcacataacgctttcatcaacttttacgacaactcat

SEQ ID NO: 1680 - DNA, 431 bp, Cyanidium caldarium
  Clone ID: LIB190-033-Q1-E1-C2
acagacagatggccaacgctggtcaagatggccttgtgcaagtcaacaaacatagaaaagtaaagagattgcaagaagataatattttgaatagagcactatcacaaccaggagatgtatttctgtgcttttgcaacatccagttgttggtgaatgcagaaagagctattataggaaatattacttgtccagaaagtatcgaattgtgtcgtctattagctggacatatagcagtttggttcgatgaacatttggatgactttcgtttggaagctatcttgggagcactattgtgtacttgttattgtgagtggaagcgttttgaaggagaaatgggggtacaagaatggaatgaattggagaagatatcttccttagatacttggaagcttgtgcttggtacaagacaaagagtggataatatgttacag

SEQ ID NO: 1681 - DNA, 89 bp, Cyanidium caldarium
  Clone ID: LIB190-033-Q1-E1-C7
gagtcgtgatatcgagagaggataggggagtacatagatgaggagtgtccgaaggagatacaccaggaatggagaagatgggagaggac

SEQ ID NO: 1682 - DNA, 381 bp, Cyanidium caldarium
  Clone ID: LIB190-033-Q1-E1-C8
gtcggtcttcattgaaaatatggaaacgacgggctttgtttcatcgtatcaaggtgttgcgttacgaccggcttggaggaagcagactatccgaaaccagcaaacatataccatattgttcagaaaccacgcaaagtcttcgaaagttaggttatcgatagcccttttcatgcagcaaacttccaaggatgacgcggaagccgagaaacaatcgagtcaacagggctccaaaatgtcaccaactactaggattgcaggtgatatctttttctttactattactacggcactttttgcagtcactctggcggctactttgtatcgctcctagcttctgcagggtttactcccgccttttccatagaccaagttgtcggtatc

SEQ ID NO: 1683 - DNA, 406 bp, Cyanidium caldarium
  Clone ID: LIB190-033-Q1-E1-D1
tccgggtacaccaagcgtcggcccacgcgtccggagcggtttgaggatatacgtaattctctgatattagctcgttttgtaaagtttccatctggcagatatcggaaccgttcttaccagttggacattgtggatagcccagtagaagcacttgctgagaagtggaacgaacagttggaaaaagaacaagatgaaactactgggttgattagcaccagattgtcgtcgagttggcgcttggcactagttgtatatgtggcacagacagtgggaagttgtatgtacagagacttggacgccgttttacagaaaatacttggcatatcggtggagagtgattcttcaacgtttcctcctcgtggcggaccgcgtgactcggagttttacttgtaaagtgtttcttttt

SEQ ID NO: 1684 - DNA, 396 bp, Cyanidium caldarium
  Clone ID: LIB190-033-Q1-E1-D11
ggattcaagtgcagctggtataaaaggtaaagtttgaaagttatagagtcttgacagtttgtgttaggattatctcgtcagctttccaacttgcctcgtattatttctcttcccagtcgtcacaaaaggaagaatattcagccaaggcatagcgtcacaacagctagtgcaaaacgggtggctgtcttggaaggtgatggaatcggtcctgaaataatgtcagtgactttagacgtgttggaagaagtaacgaggcttttcaagtttcccttaaagtttgaaaaggctccttttggaggtgctgctatagataaaactggtgatccgtttccaatagagactcaaaacttatgtttatcaagtgatgctgtgttattggcttgtaatggtggctat

SEQ ID NO: 1685 - DNA, 313 bp, Cyanidium caldarium
  Clone ID: LIB190-033-Q1-E1-D3
tgtcattgaaagcaccgttcacgtttagtctatcacctgtgcatgtcataagacaacaacaactgtacaatctgatacttgaatatgcacgaagaaaaggaatacacagatttgttgagatgaatggcaaatggtggatatattctacgacacctcccactcgaaaggcactgcggtattggtatgacatggactgcgtgctgtttaccccagtcaatgacttacaaaccgccaaagcttatgcgagaagagtagggcaagcattggacaccacacctacggtcgaattgcctacaccagatatttgtgtacg

SEQ ID NO: 1686 - DNA, 331 bp, Cyanidium caldarium
  Clone ID: LIB190-033-Q1-E1-D4
gtcggcccacgcgtccgggcctttaaggatttccggaaaaggcgctcttgtattttgtggtggaagaagagagagagcgtggccaagacaagtatgggaaggaagaaaaaggcgccacagacagatattgtcgatcgaatattttgctggtattgtgacagagactttcacgaggagaaaattctcgctagtcaccaaaaagaagagcacgtcaagtgtcagtggtgtaacaagccgctcatgtccgtaaacggacttgtggtacatgctcaacaagtacacaacgacgaagtgacgcgtgttctcaacgcactagaacgcatggactcta

SEQ ID NO: 1687 - DNA, 257 bp, Cyanidium caldarium
  unsure at all n locations
  Clone ID: LIB190-033-Q1-E1-D6
aaataaaatttgaaagaagtaggagtgtaggggatattataaagtaatgaaaaagataagaatataaatataaaagtaaatgtttataagagaagataaatatagaagatgtangtaagtagaaggaagtatagagatgtagagagaaagaataaaaagaagagtttatcagcaaaataccataatcaaatacacacatagaacaacgtataagagttaaatgaaacataacacaagattagaatgtaatacaacat

SEQ ID NO: 1688 - DNA, 323 bp, Cyanidium caldarium
  Clone ID: LIB190-033-Q1-E1-D7
caacagcatcactacacgttggttgtcacttgttgggtggttatgtaatggtagccatgggcaaccaccgtggagaagactttatcacgttgggggaaccagtgcatcgtttgagcgtgtcctcgtattctaacgggcgtcaggtatgtgccactgcacgtccctttgataatgcgagtctggagattcagtacacgcaacttgccaataacaacgtacctgtcaagctctgctcatccgtggtgtgataaccttcatcatcctcgtacacaaggcccttgacacagtgctccggaatatcgacgagacccagatacttctcg

SEQ ID NO: 1689 - DNA, 367 bp, Cyanidium caldarium
  Clone ID: LIB190-033-Q1-E1-D8
atcaactgatggagtggagagggtcaaagtttatagtcgtccaaaagttgcagttttttccactggaaacgaacttgtagatattggaagtgtacctgcttttggagagatatatgatgccaacagacctcttctcctagcagcgcttcgtgggttgaatatcgatgtactagatttgggtagtgtgggggactcagaagctcatattatgaagacttttgaaaacgctctggaagtggcggacatcgttgtcactattggaggcgtttccatgggatgtcacgactatatacagatattattacaacgactggctaaagtacactttggtcgagtcagactcaccccgggaaagccgttaacttct

SEQ ID NO: 1690 - DNA, 382 bp, Cyanidium caldarium
  Clone ID: LIB190-033-Q1-E1-E1
ccgggactgaccacgcgtccgcccacgcgtccgggagaagatatttggtcgcattcgctttgtttaggaacaaaggaatacctagagacagacacaaaactattacctacaggcagaattctgcaagccgagtctaaatcgtatttggactttaccgaagaaaggctcctaaagggacctcctaaagaagagtctggaataagaaatggctatgatcacttttttgtgttcgataagactggaccgaaatcgtcattagaatggatgagtacagttcgtcatgcggagtctaaaagaactttgaaactctatagcgatcaacctggtgtacaattttataccggcacgtttcttcaagcctcaactatgtgtcgctatcatc

SEQ ID NO: 1691 - DNA, 183 bp, Cyanidium caldarium
  Clone ID: LIB190-033-Q1-E1-E2
attgaaaattaacctactgaagcacataaagacaaaaaaaatacataaccacatattacgcacatagacatcgtaaatgaaagaaggaagacacataacgaccaacaaatctaagaaagagaaagaacaagaaacaagtgacaagaaacaacaatagaaataaaaaaaaaaaaaagcgcccaa

SEQ ID NO: 1692 - DNA, 308 bp, Cyanidium caldarium
  Clone ID: LIB190-033-Q1-E1-E5
tggaacgatgaagttccagtacgttagtcctttactggctctcttatgcgtatgttctgctctggctgctgaattggcacctgcaattgcggattaaccggtagatagaggatatgaggaaccctgctgtaccgaatattgttattgggatgaaatatgtatcactcccacacgcagacgtacacgaacctactattaccattattacacaagagatgcagcataggaaactgtccatagaatcgtagaaaacagtacctcatcagtttaaaaatctgatgcggttcgagggtatttcaccacatact

SEQ ID NO: 1693 - DNA, 449 bp, Cyanidium caldarium
  Clone ID: LIB190-033-Q1-E1-E8
ccacgcgctcggcccatgcgtctgtgaagaaaccaaagagaccttatttagctatcttgggaggagccaaagtatccgataaaatacaactcatccagaatttattacaaaaagtggatgaaatgattatcggaggtggcatgtgttatacttttcttcgagtattatattccatgccgattggagactccatttatgacgagcctggatcacatttggtagaaaatattatgaaagaagccaaagaaagaaatgtaaagatacattttccagtcgattttgtagtagccgatcgtatggctcccgatgcacatacagagatacgtatcagagaacaaggtattcctgagcatatgcaacgactggattgtggaccacaaagtattcaacaatttattcaagtactgcaacattgtaatacactagtgtggaatggacctttgcgtgtg

SEQ ID NO: 1694 - DNA, 371 bp, Cyanidium caldarium
  Clone ID: LIB190-033-Q1-E1-E9
acgcgtccgcagacgagtgggggtggttggggacgacgcgtctcgtgcggttttgtgtgatatttgaatggcgaccaagagaataaccaaagagttgcaagacttgggtagagaccccccttctaacggtagtgcggggcccgtaggggacgacctctggcactggcaagctactatcatgggccctcctgactcgccatatgctggtggagtgtttttcctcaatatccattttccaaccgactatccgttcaaacctcccaaagtgcaatttaccactcgtatatatcacccgaatattaactccaatggaagtatctgcttggatattcttcgcgaccaatggagtccaccactgactatctctaaag

SEQ ID NO: 1695 - DNA, 452 bp, Cyanidium caldarium
  unsure at all n locations
  Clone ID: LIB190-033-Q1-E1-F1
ccgggtacgaccaagcgtccgcccacgcgtccgaaagcactatgaaggctgggaggaaactgtcgaatatttgaggagtgtgtttcgtttgcagggtccttttgaaggtgttttgggatttagtcaaggagcagccttgagctctctcatttgtgctatgaaagaacatccagaacttggctatggagaattttcttgcatccgatttgcccttgttttttcaggtttcgtttcncgtgcagaagagcatttgccgttgataaaaacaaaaattcatactcctgctttgatttgctacggaaaagctgatgatctggtggacgcttctcgaagtcaagatcttgccaagttgtttgtaaacgctaccatattggaacatgaaggcggtcatttggttccttctggagcatctgaaagagaacaaattactcgctttgtcttgcaacatggtg

SEQ ID NO: 1696 - DNA, 375 bp, Cyanidium caldarium
  Clone ID: LIB190-033-Q1-E1-F10
cgcgtccgcaaacgcatccgcccacgcgtccggttgctagaaatatcatagtagacccacgtattgttccaggaggaggagcgaccgaaatgtatgtttccaaggcactggcagaaaaagccaagtctttggaaggtgttattcagttcccttataaggcagtttcccaagcaatggaagtgattcctagaacgttattggaaaactgtggggcgaacgtggtgcgagctttgacggaacttcgtgcaaagcatgctagtggaaaggatatcccttggggtgtgaatggccaaaccggagacattgtcgacatgactcaatatggaatctgggaaccttatacggtaaaagttcaaactgtgaaaactgctgtgg

SEQ ID NO: 1697 - DNA, 312 bp, Cyanidium caldarium
  Clone ID: LIB190-033-Q1-E1-F11
cacagattcctgttgatattcagtggaagatttgtcattatatggaagtattgtgtgaagaatcgtccaaagttcccgttgcagtgattttaaaagtattttacgatgaagatttggttgaagaagatgtgatattgaagtggtattactctgaaaacagaggagtgggaggaaaggttgcaaggaacaatgcttctatgttggttgagtggttggagaatgctgaatcagaaagtgattcttcagcctgattgtgttgttatgtgagtgcttgtttcgtgaaataaaagcgattccttgttttctgcaccg

SEQ ID NO: 1698 - DNA, 274 bp, Cyanidium caldarium
  Clone ID: LIB190-033-Q1-E1-F2
tgtagcggaatggaaaacggcgtacaacgcaacgtttttgctcaaactgctgaagcagtaaacgacaattccattgctggacacaccaagggtacttttgcagtgaaagtacggtcggctcagatgctgaaaggtggagttatcatggacgttgtaactcctgaacaagccaaaattgcacaggaagcaggtgcttgtgcacttatggcgttggaaaacattcctgccgatattcgcaagtctaatggactggcaacaatgtccgacccaaaca

SEQ ID NO: 1699 - DNA, 411 bp, Cyanidium caldarium
  Clone ID: LIB190-033-Q1-E1-F3
ccgggaggaccaagcgtcggccgacgcgtgggtggagccatgaggatgaatcaagtgattgcttagttgtgtgaaggaaataaaatatttgaatgaaacagtcgttccagttcaactttcagccaacaacgaataacagtaacaacagtcatagccatactcttaacttggaacaaaacatcaaagacttgaatattgtatctagcgacagcttattcgacgtggatccttgttatgattccgaaaaggttgttatccacgattgccttactttatggaagagaaaatcgtccagccttgtcagcaaatattttggagttgaacaggatgttataacgggtatttatgaacgtggtttcaagctttgggaaggtgctattgaccttgtaaagttcctcgatactatcaata

SEQ ID NO: 1700 - DNA, 190 bp, Cyanidium caldarium
  Clone ID: LIB190-033-Q1-E1-F4
cacgcgcccgagatcaaagagtaacacatgcacgtaggtatagcgaacgggtgagtaaagacgtgtgaaagagtggacgaacatgaaagcacagaagaatgtaagaaatggttagagtcaagaccatacctgacgtaaaagcgggaatctgagatgacgagagccacattggcactgagaaaaggtccaa

SEQ ID NO: 1701 - DNA, 90 bp, Cyanidium caldarium
  Clone ID: LIB190-033-Q1-E1-F5
acccacaacgacaacatcatgataaagggaccttctcaacgctaccatccttcacacgttaccattgggatccctaacatcgtcaccatc

SEQ ID NO: 1702 - DNA, 430 bp, Cyanidium caldarium
  unsure at all n locations
  Clone ID: LIB190-033-Q1-E1-F6
accacgcgtcggccttgcncgccatgccttgagttgtatgaaggctcaagtttgtgaaaaaaaggaacccattttgaaagaagaagtggacgacataccgttatccaagttatggaaagaactacacaagtctgaaatcaaaggctcgacggggacaaaggaaccaaggaaaaaggaaacgaagaaaggagcaacgtcaaagaggactcttacaaaggtctgtggaaagtcagcttcgcccaaaaagaagcccaaggtatcgaaggaaagcgatgacaaactcgctagtaagaaattttccaatcctggtcaaagaagagaagcacctccgaaaggagaccctcttcgattgttctatgaaagtatgtatgaagaaaagaaacgaaaaggccaagacgcaacacttgcagaaaactggcttctgattcac

SEQ ID NO: 1703 - DNA, 228 bp, Cyanidium caldarium
  unsure at all n locations
  Clone ID: LIB190-033-Q1-E1-F7
ggaacgctctgttgattgaatgttttcattctaatttctttgtagtcgacaccattcgagggtttgttacactgactgttggtgcncctgttttagctcttgccgctagtctttcgtttgcgcattattatcgacgcataagtatgccgatttgtgcaaacgaagacacatttttcgagtgaatgcacaatgtttgcgacaataaagaatagttgtgttattcgttgg

SEQ ID NO: 1704 - DNA, 443 bp, Cyanidium caldarium
  Clone ID: LIB190-033-Q1-E1-G1
ccgggacgaccacgcgtcggacacacaagacaacaatgtctcgtcacaagtgtttctttgatattgctatcggtggacaacctgcaggaaggattgtattcgagttgttctccgatgtcgttcctaaaaccgcggaaaatttccgtgccctgtgtaccggtgagaaagggtttgggtacaaagactccaagtttcataggatcattccccagttcatgtgccaaggtggagactttacacgcggcgatggaaccggtggcaagagtatttacggcaccaagtttgaggatgaaaacttcaagttgaagcattcggagccctttttattgtccatggccaatgcgggaccgaattacaacggaagtcagttttcaatacggtagtgaaaacaccttggttggatggaaaacatttggtgtttggaaaggttgtaaaaggtacgg

SEQ ID NO: 1705 - DNA, 353 bp, Cyanidium caldarium
  Clone ID: LIB190-033-Q1-E1-G10
cgagtggctggattcctaccgttgcagactatcgcgtgttgacttctgtggagaaggatcaaactttgtccaaaggagcggagatgcatcaagaagagtctgcataaaggactatttttgtatagttgccatcatggacggtttgtgtggaaagttgtgattgtgtagagagtgtgtttgtgagttgtgtgtggtattgttgttttacgtctttgtgagtgaccactcgtaggagtgtgatgaatcctcacaaagatgatagaagacaataaaacgatgttgttttggtataaaaaaaaaaaaaaaaaattttttttttaacaaaaaaaaaagaacaaaacgcgcattcagac

SEQ ID NO: 1706 - DNA, 360 bp, Cyanidium caldarium
  unsure at all n locations
  Clone ID: LIB190-033-Q1-E1-G3
ccgggataccaagcgtccggcgaagagaaatgctgggtggagtagcgaaacaagagaagggaagtaaaaggtaagaaagaggaaaggtttacgagagaangaagtagaaagaagagagtgtaaggcggcgtcataatagaaatccgaaaggagtacaagaaaagagagagaagaaagaaaagaagagaaaagccgtactgaagaccgacacaggtactcgangagaaaggagacccacattaaggtgagagaatggacgataaggaactaagcaaaaggatatggtatctgcggtacgcttagaagcagcanaccagagaagaaagcgttaaagcatgaaagaaaagatatccgaaaaag

SEQ ID NO: 1707 - DNA, 146 bp, Cyanidium caldarium
  unsure at all n locations
  Clone ID: LIB190-033-Q1-E1-G4
tcaacttggaatagttttcacgacancactgtcactcaactaatttctcgtgctgactccattcaatgacgcttctgaatatgacttcccccatataaccacgtctcatcagataaatacatctattgccaaactctgattcacat

SEQ ID NO: 1708 - DNA, 463 bp, Cyanidium caldarium
  Clone ID: LIB190-033-Q1-E1-G7
accacgcgtcggcccacgcgtccgctttgaaactccgtttcttgatatgaaccgaggtctctatcatgaaccagaatatagtcttccggaatgttacaaaatggaacaaaagccgccattattgaaattgggtcattttaggaagtttcaattgcaaacattattttatatattttattgtatgcctcgagatgcattacagatacttgcagcagcggaactttatcaaagagattggagataccacaaagacttgaagctttggtttacaagagcacctggaacaactactccaggatatgaacgaaatgcttttatctactttgatataactacatgggaaagaaaaccttttcatgaaacgaatagaaacttcttgcaaggttttcttcctcaaaatgtgattacggaagctgtggaacatttagtaaattcctctcattcgtcgtcctaaaatcgagaa

SEQ ID NO: 1709 - DNA, 386 bp, Cyanidium caldarium
  Clone ID: LIB190-033-Q1-E1-G8
gcgtcggcacggattgtaattgttgtatgttgttatgtcggaaataaaggtttccaacaatacggaaaataatgttgaaaacttggaaaatactgcacacgatacgacttatttagacgaagctgacgtcgacgcggaattggaagcaatgaagagtagactacaagaaatggaagaagaagccaatcgactgagagaagttcatagtacttctgaagtaccttcttcagaagaagtagaccgacgctcagtatacgtgggcaatgtagattatggttccactccagaataacttcaggcacactttaaggaatgtgggactattaatagagtaactatactatgtgacaagtttactggccatccgaaacgatatgcatatatag

SEQ ID NO: 1710 - DNA, 408 bp, Cyanidium caldarium
  Clone ID: LIB190-033-Q1-E1-G9
acgcgtccggcactcgacgattgtcatttccaacaacttatttccaccgtctgtcaaggaaaagtgaatgtcgtggtcgtcaatgctcatacgttttgtacacctcaacaagtaaccgagaaaatcgtacgaaacagcaagtcaccgttggaaataagatacgaggaccaggatcatcaaggaggcaattggtttctttgtgctttggaccaagactgctatgtacaaatggccaaaggtgctaccgatgaagaatggcttcaattattgcgtcgttggttgccgaagaaccaaccaacgatggataggatatgccttccttggatatcccaccagcatcaagtgcccaactatgtatatcaagcttataagcgattggtttgttttgcgctatcttcccaaattgcc

SEQ ID NO: 1711 - DNA, 391 bp, Cyanidium caldarium
  unsure at all n locations
  Clone ID: LIB190-033-Q1-E1-H1
ccgggtacgaccacgcgtcggggcgtgacttgacgacgttgggaaccacatggttcatctatttctcagcaataggcattcttcgaaaactcattaggaaacctcaccctttacaacctattgtgtttttccacaacctttttctggcagttgctagtttatggatgttcctaggtatctgtgtggctctaaagaacacttggatggaaggcggcttgaaagctatctattgtcnccactctataaaaacttccaacccattgacctcatctttttactcatcttctatcggttattggttgtatgtcttctacttgtccaagttttatgagctactggatacttttatcctcatctgtcgtggaaagccactaacgttgctacacgtact

SEQ ID NO: 1712 - DNA, 441 bp, Cyanidium caldarium
  unsure at all n locations
  Clone ID: LIB190-033-Q1-E1-H3
ccgggtacaccaagcgtccggactagttctgttgaatttatctgtatcgtttacttgtctttttgttgagttatcatggcacgaacaaaacanacagcacgcaagtctaccggtggtaaggcacctcgaaagcagttggcaaccaaggcagcaagaaaatccgcacccgtaactggaggagtgaagaagccccatcgttaccgtcccggtactgtcgccctgagagaaattcgcaagtaccagaagagcactgaacttcttatccgaaagttgcctttccaaaggttggttcgtgaaattgctcaagactttaagacggacctacgtttccaaacttcggcggtgactgcccttcaagaagcctcggaagcatacttggtcggtttgtttgaagataccaatctttgcgcaattcatgccaagcgtgtaactatcatgcct

SEQ ID NO: 1713 - DNA, 214 bp, Cyanidium caldarium
  Clone ID: LIB190-033-Q1-E1-H4
tacctcagttagactgggagtggcacgacaaggtggtttcttaagtaaacattttctaaacctgtctgtaatagttgctttcaattgcagaagttagcctccgcaggtttggataatgtgagataaacaacaagttgtgcattgctgtttgtgagacttgcgaaaattgtgttttgtgtcttgtaacattttatataaacacatattatctatc

SEQ ID NO: 1714 - DNA, 239 bp, Cyanidium caldarium
  unsure at all n locations
  Clone ID: LIB190-033-Q1-E1-H6
catgaatttaacgatgtgtattagtttttcncctggttctcgactcctgttggtacgacaacttgttgctttctcttattttgtcaaagcagtcttcttgttcttcttgcgtccagtcttttgttcgcgactagcctgcttgatttgccttttaaaaaagttatagagtgatgtatccgcccctatttgttgtgttcccttgaacaaagagataggttgtttaaagcaagacaaggaaa

SEQ ID NO: 1715 - DNA, 494 bp, Cyanidium caldarium
  Clone ID: LIB190-033-Q1-E1-H7
ggataccgggacgaccacgcgtccgcccacgcgtccgcccacgcatccgcttttgtatctcatcgtttgggctgtaaatgttgctaatggaacaggaagctggtgtgagcatggaagtgcccactattagtgctgccaaacatgactctgaagatagccacgaagaagtgaggaagcggttgagtagagtaagcgctccaccgtttcccgatcctacttctctaggattatctggttttagttgcacaactttcattcttagcgtaatgaatgccaaattattgccagcgaggattgtaccaggaattgtagggcctgcctttttctatggtggaacggtacaaatgttggcgggccttttatgttttgtcactcgtaacatgtttggattggtggcatttacttcatttggagctttttggcttgctgttgctactttgatcactttggaagaagaacgaaaactcgtgttcggaacagatgccaaccaagtc

SEQ ID NO: 1716 - DNA, 349 bp, Cyanidium caldarium
  unsure at all n locations
  Clone ID: LIB190-033-Q1-E1-H8
gcgtccgcccacgcagtccgcccacgcgtccgcccacgcgtccgcggacgcgtgggcgaaaaagtaagattgtgcttgggaagtggataagccatcgttatatgcggagttgagagaccccacttgaagactaaatgaaccaaagggactatcagtaccactagtcgagaaaccatacccctgcgtgaagccatatcctggatttcctgcgtcaaccactgaattcagcccgactgctccaaaatatggatcgttgtanggctgcacatactgttgtgcgtanggcagtacagcagtatttgagggaacanattcacagtattcgaagtgagggattctgcttgagaca

SEQ ID NO: 1717 - DNA, 385 bp, Cyanidium caldarium
  unsure at all n locations
  Clone ID: LIB190-034-Q1-E1-A1
ccacgcgtcgggcgaaaaanaaagaatgagtggagtagtacaaggagcgaagatgatgggagcaggaatggcaacgataggtttagcangagtangagcangagtgggaatagtatttggaagtttgttgaatgcatatgcaaggaacccagtattgaagcagcagttatttggatacacgatattaaggtttgcgttaacagangcagtangactgtttgcattgatgatgagttttttgatactgttttcatagtatacgagaaacaagaagtagaagagaaataaaagagacagaagaagagttatgagagacaagatggaagtaatagaagtggtaagtggagtaataatgaatcatatgaaagaaggaatggagaatata

SEQ ID NO: 1718 - DNA, 515 bp, Cyanidium caldarium
  Clone ID: LIB190-034-Q1-E1-A2
ccggtatacaacgcgtccgacagttctgtcctgccagtacgatgctttcaaaggatgactctaagaggtatctaataacttgtattttccatcgtatgacaagaggcttgttggaaaaaagcagcggataacttttgtgctgattttgcgtcttgcttaagtagctcgctttactggtttcaaatcttgcagtcatcagtgcaaaacattccactaggaatttggactgatcgactaaggcaagatgcgtgttgtttggttgcgggtttcgttgttgttctttgcctgtattcggctattggttccaggtcctcatacgtactttctgtaagagagagttcttgaaagatgaaagggatttgcagtaacagagtcacaaacagttgtgccaactccttcatccaattgtgtgttctatcaattggaatatgcagtcaacattgtgtaacttgatagaaatttaccaaagactacttttgcgatgaaataataatgaaacacagagttcacatatg

SEQ ID NO: 1719 - DNA, 244 bp, Cyanidium caldarium
  Clone ID: LIB190-034-Q1-E1-A4
gcgtcggccaggcctccgctcatatactttatgcttggacaatggttgcaaagactgctctgagttgcctctttctctccttccttatcgctgccgcagttgcagcccacgtactttcagaggagagatggggatatgctcagcacacccaacaacagcaacagtgccaacaagtatgtaaacagtatgcatactaccagagtcgagtcggcacttccgtaaccacagacagcccatactggaa

SEQ ID NO: 1720 - DNA, 392 bp, Cyanidium caldarium
  Clone ID: LIB190-034-Q1-E1-A5
gcgtttggaattgtcatctcaaaggaaagagcaaacgcagaatggagaaaggaatgagagaatcagaacttacaactatttgcagtcaagagtgacagatcatcgttcaggtttcagtgtacaaggtgcaggatttgaagatttattgaatggtggagagtccctggaacaaatgatagttagtgtttgtgagcgagatcgacaagatctggttagacgtgtttggaaaatggaggcacctatggatatcttatggaatggcttttccttaaaatagaaaatgaaatggcattgagtctttcggggtatatcggcagagaggaaacaatcaaaggcattctgcgaatgttggtatttatatttaaggagcaaagtcatttgataacattttg

SEQ ID NO: 1721 - DNA, 94 bp, Cyanidium caldarium
  Clone ID: LIB190-034-Q1-E1-A6
ccacacagaaacactgaatacgatcaagaaccaatgcattttaagcaacggacattggaatcaaatattctccataatatctcaataatatgat

SEQ ID NO: 1722 - DNA, 437 bp, Cyanidium caldarium
  Clone ID: LIB190-034-Q1-E1-B10
cacacgcgtccgcccacgcgtccgcggacgcgtggggtccaagttggcggatttctctatcgtaaaacagtggttccggagcaaaatatctatcgaagtatttgccaccgcgcgaacaagagctaggcaaacaagcttttcgacgatacgaaattcttttacgagcttcctctgtaatcttactacttcagctgacaaaactgccatgataaagccagaaagaccaaggaagcctccacaaaccatatcagttcccaaaaggttgaaagtacaagactccattgaaacttcgtccacttacactcaatgatataaaggtgcttagacctcctgaccaaacagcataaatcatgtgttcaaagtaatcataagcccgtcgatgcaggatctccagagcgaacagtgaacctttaagattcgcccaaagacgaagactg

SEQ ID NO: 1723 - DNA, 423 bp, Cyanidium caldarium
  Clone ID: LIB190-034-Q1-E1-B11
cttgtgtagagcggcgaacgacgtcgattgtgcggtggcttgatcggttccttccctaatattcgacaacgagcatggaagaaactgctgtaaggattatcttgtgttggatatttttagcgcttacttgtatatcaacagggtgctagtgcagcttccgcaagtggtgcgcctaagagaagaacttttcgcaagttttcgtaccgcggagtagagttggatcaactattggacttgaacatggaacaactaaaggagttgttcaactgtagaatccgaagaaagttgaatcgcggaatgggtatcaaatacaaaacactgttgaaaaagttgcgaaaggcaaaaaaggtcggacctccatggttggtcattgtcggtggagactgaagttgttttcttctctttgtgataggaagccccgga

SEQ ID NO: 1724 - DNA, 434 bp, Cyanidium caldarium
  Clone ID: LIB190-034-Q1-E1-B12
cggacgcgtgggtggtgatgagaatattcgtcaattgttgacaaagaagttggaaggacacatgctttcattgagtttgcacatgtatggctgtcgagtagttcaaaaagccttggaagtattgaaagggaaggaacgaaccatgttggtgcaagagttgaatggacatgtgcttcaatgtattcgtgatcagaacgggaatcatgtgattcaaaagtgtattgaattggttgaaccagagagcattttatttatcgtcgaatccgtcaaaggacaagcagttgctttggcagaacacgcttatggatgtcgagtggtacaaagagtattggaacattgtccaatggaacacaaggcagaaatattagctgaaataatgtctagcgctagggatttgattcgtgatcaatatggcaactatgtaattcagcata

SEQ ID NO: 1725 - DNA, 291 bp, Cyanidium caldarium
  unsure at all n locations
  Clone ID: LIB190-034-Q1-E1-B3
aggagaagaagagagggtatgcttagaagcagcaaaccagagaggaaagcgttaaagcatgaaagaaaagaaatccgaacaagaagagaaaaaggtacgacagaggaccgaatcagggtaagaggtagaggagcacgacgagaagagagaatgctgggtggagtanccaagcgggagaagggaagtacaaggtacgacagaggaaaggtttacgagagaaggaagtacaaagaacacagtgtaaggcggcgtcataatagaaatcccaaaggagtcgaagaaacgagagag

SEQ ID NO: 1726 - DNA, 91 bp, Cyanidium caldarium
  Clone ID: LIB190-034-Q1-E1-B4
atcatctaaacattgtgcaaaatctaattctaaatacctaagaatcaaataaaatctgacatggtgattgctgacactgcacaacacaact

SEQ ID NO: 1727 - DNA, 424 bp, Cyanidium caldarium
  Clone ID: LIB190-034-Q1-E1-B5
cgctgccagggatcatggatatcctttacgatttgttgttcctggctatgttggagctcgaagtgtgaaatggctaactcgaattatctgtaagatggagtctcccgatggatattttatgacgaaagattacaaatatctgccatctaatatggacttcaataatgtggattggagctctactcctcctatcatgaacttgtctgttcagtgtgcaatatgtgatccacttccagatacaaagttgtctccaggcccttataaaatccgaggatatgcactaacaggaaaatgagaacatagtatgagagtagaggtatctattaataactccaacgactggcaactggccactttgatcaaaggagaacaacttgcacacatagaaattcctaatagggtcacttctggaatgaacgattgg

SEQ ID NO: 1728 - DNA, 543 bp, Cyanidium caldarium
  Clone ID: LIB190-034-Q1-E1-B6
ggaatcatgggatcaccacgcgtcggtgttattccagttggttggaagacttgcaactatgtgggttttcaaggaatacgttgtactacgaaacgaaccctagttgcctataaaagtcccatttcctcgtcagctgtcttaaaatgtgctgtagaaagtgtgcatccttcagaggcccatcggaaaaaacaaaatgaagcgtggaaacaccttgatgtcaggacagaagaggaatacaaagctgggcatgcaaaggatagtatatgtgttccagtaatggttcgagggcaagatgggaaactacaagacaatcctatgttcttgcaggacgtttccaagtttttcaagaaagacgataaaatagtagtgtcgtgtttgaaaggcccaagagctatgaaggctatagagaaactacgtgaggctgggttttctcaacttgtgaatgtagaacgtggctttgagaagtggcaggaaagtgcacttcctgtagaaacctagttgtgtgtctccctacaatacagacaacatgcgattattcctatg

SEQ ID NO: 1729 - DNA, 560 bp, Cyanidium caldarium
  Clone ID: LIB190-034-Q1-E1-B8
ggattcatgggatcaccacgcgtcgcgtgtgtttgcacgtgactattcgtccagaataacgttggctttactttagcaagcactcttctttggaaccgggggcagttatatcatgttatggaagtctttactggaatatataccttccaaggaagtttttatttcgtttgttcgttacaagcctcaacctaatcggggaaatcttgcaagagatttacttgcaaacgaaaggacttttctttcgtggcttcgtacgggaatggcatctatttctgtgggtctagcttttgggcgtctcattggaactacgctctcggaagtagtgggaaccttgtttgtatttctaggcctatttattgcggtatattgctgtatccgatattatgtaaatgtgtttcagatagaagacgacaagtatacagcggacacagttggtccctggatattggtttccttgttggttgctattgcggccgtatcctttgcacttatattcgtgtagttaattgaatatttacctagtatgaagacatttaattgatataaagggactaaaatct

SEQ ID NO: 1730 - DNA, 438 bp, Cyanidium caldarium
  Clone ID: LIB190-034-Q1-E1-B9
aagaaagctgagtcagggtgtcaatactgcgttgaaatcgggtatgaaggacgatgaagctgtcagatccgtggaagaaagaatagtgagtgaagtagaaggtgaggaagcagaagaagaggcaggaggagaagaagaagagcaaacaccggaaaaggaagaacaatcacccaaagagactttgactttggatgaatatttggctaagcaagcagagaaaaagttacaacttgccaatttgttgggaaacaaacctcccaaagtcagagaaaccagtacagtagcagttgatgatttgaagccttggaagagagaagacgacgatgatccaactttatcagaaataggtcaaaagaatttgcagcagcagcaacaaaatgctgtaaataatatgaataatagaaaggataacaagaacaagacagtagatatgaccaa

SEQ ID NO: 1731 - DNA, 242 bp, Cyanidium caldarium
  Clone ID: LIB190-034-Q1-E1-C4
ccaaacctgtgcaaaccaatggttgacgaggaaaatactgacgaattgaaagtaatatcagctgctagtggtttacgcaagagtatatatctttatctcattgctgtttttgcccgacactttcgaatcccagtgcagtatatccgaactacaggagatcctctccctcaaaacgcttaccatcactcggttgggtggaactatctcggaaactctggagcgatgctccgtaaaaaattcca

SEQ ID NO: 1732 - DNA, 480 bp, Cyanidium caldarium
  Clone ID: LIB190-034-Q1-E1-C5
accacgcgtctggcttcgtctactcacgagaggtattgcaccagttactaaaagcattttgttatccacagtaaagtataatagtcctttgcagctgagtaaagcagagatatggagagcttcttatccaactggaagcagacgttcctttgcagaacaaaaggcagagcagcggtccaaagaaggtgaagaaccaataacgccttagcggggtgtgacggagaagctggataaaagagacccaaactatccttggaaggtatctactccaaatatgtttacactgttctcattttgttgcttgtactggagaagttttcttccagaacatacctataaacccaacctcaatatcaatctggacaggcatcatacacctttagattttagagatagagtagctcggggaatcgtcttttttttaagatttttgcggatgccttttttcagaaacgatacggacactgcgctgttgtgcta

SEQ ID NO: 1733 - DNA, 593 bp, Cyanidium caldarium
  unsure at all n locations
  Clone ID: LIB190-034-Q1-E1-C6
ggaattcaatggatcaccacgcgtcggcgcggaggcttggaagctgacatgcagagacacagaatgaagacgacatttattatgtcttccggcacgttgtgtcctacttcacgcaagcatcgttgtgtacaatgttgtcagtcgagaacgtggaagatgcaacttgctccaaagagaagttacgacagatacattccatcacctcctggccttcagaagctaagagattatcaccctcgaccaaattacccaggcaccttagcgcctggtataacaccggatattttaacggtggaagagttgctcgaaagcccaacggaaaatctagcctgtgtagagtacgacatggacgaacgtgctcctctcgtacgggaacgtgacgactgcatattggattggttggcagaagatggacgtttgattgaagatgattgggatgtggaagacaagacttcttttgtagaaagtgtggatacgatcggtgatgctaccctcgtacatgatgaanaagtattagcagagtatttacgtgaagcggatgcttcagaagatgaatactatttagaagaagtggaaacgtgatcaagttgtca

SEQ ID NO: 1734 - DNA, 454 bp, Cyanidium caldarium
  unsure at all n locations
  Clone ID: LIB190-034-Q1-E1-C7
cggacttttcaggcacccaaggaacgtntaaaccaaagatcgctcttctaaagccggccttcagtttccagttggacgtgtaagtagatcctataagaatggaaactaggcagaagaatttggacctggagcagcggtgtattaaccggcattttgggaaaattggacggcggagttgttggaacgggcaggcaatgcacctcgtgataccangaaaacccgtagagtcccacgtcagattcatttggcagttcgtaccgacgaggaccttaccacgctgttgggcggtgtgactattgcttcaggtggcgttcttcacaacgtccatcccaatctgctaccaaagaagaacgcaaaggaagacatgcagtacattttgccttgacctggtgtctttgaacaccaccttcacaagaaacttgtcactttattggaatgtattgaacatgtgaaa

SEQ ID NO: 1735 - DNA, 575 bp, Cyanidium caldarium
  Clone ID: LIB190-034-Q1-E1-C8
accacgcgtcggactggagcctcttaattgagtgccaaagaagaagaagaaaaagaagaggaggatgtcgactttgtggggaaaacccaagtctagaaacgtacaaatagaacattggttacattctttggaagaagttgaacaagtagctaggtcagtggaaccaaaattggtttcaactacagccaaatggaaaggaattgcccagaggtgcaaagaaatagctaccgacctttgtcaaatattcaacaagaatgacccccattatgaggttctattggcatcttacacaagttcgaggaagtttgaagacgaacaacatcaagtgaccaaggttggtattgttgtgtacaagtatttgttgtaaaccatatatctctctctctcttccatatatatatatatatatatatatatatatagatcaacgagcttagggatagaccagtcgagaggttgcgccactatttaccggacattcagcaactgaaagcacagtgtgtcgaagaacaaaagttgcgtgcccgactagagcactatcacgccacagtaaagtcgctagacaagagacacgc

SEQ ID NO: 1736 - DNA, 430 bp, Cyanidium caldarium
  Clone ID: LIB190-034-Q1-E1-D11
cgcaaagcgggacagtgagatgtcggaggtggcaggctttgttgcgtgctgtaatattttgttctttacgacttttagataataaattcttggaaaaagttaaatttagtggggaagcgtcgattgacagtttcttgagtaaacggtccgaactgagttaaaggaagtctccgttacgtggcgaacaacagaaagagtagagttctttagtattttagagtattttaaaatactaaaaaaaaagtttcgcctagaatgataatttcgagacgcccaggttggtgtcgaagaacaagttttttagtcgcaccagtatacgtctcgtacaatagaatgtatttgcaagactcttttgtctctccgttccttgaactgtttcttgccaattaaagtcgctttgttctgaaaaaaacacgacccgccgcgtggg

SEQ ID NO: 1737 - DNA, 386 bp, Cyanidium caldarium
  unsure at all n locations
  Clone ID: LIB190-034-Q1-E1-D2
cgcgtcgggcaagcactgcatcaagtaagtatctcttcagaagatcaagtacgagtcttgctctgctcaatatgaagttcanaagatcaagcagcaacaatgtactatgacagtctctgaacaatacatacagcccgatacttgctacaagtatgtccctgaacaacaggtggtgcctcatacttgttacaagtattattctgtacgggagtgtgattgaaaagtgctatcctcagtatgcaacaacggagaaatgtgtagagtatgagtatgttccatatgccacttctacaccttatccatcggtatctctaagttatactccttcagcatatcagacaacttctgcttactaaagagccgaacactggatagatttttgaagt

SEQ ID NO: 1738 - DNA, 546 bp, Cyanidium caldarium
  Clone ID: LIB190-034-Q1-E1-D5
ccacgcgtccgcgcagcgattccatgttgaaagagggtacacgtatattgtccgatctcaagtttcaggtgcttcaagatggaaaacctcaggtgataacttcggatcaagtattcggaggaaagaaagtagtattgtttgggttacctggtgcctttactccaacctgctcgaggcagcaccttccaggctttggacagaaggttgatgaggtcaaatcgaaaggagtagatacagtcgcttgtttagctgtcaatgacccttttgtattacatcagtgggcagagtcacagggagtggcaggaaaaattctcatgttagcagatggtggtgcgcaatctgtcaagaaacttggactggatatcgatactggtgactttggtggtattcgttgtcgtcgattctcaagcttgattgattattatgtcgtgaaaaagcttcatttggaagaacgcacaggatttagtggtgcctcttccgcacaaacaatattgaaagatttgtcttgaatacatttgtttgtcataccacttgtgtcgttgtttg

SEQ ID NO: 1739 - DNA, 545 bp, Cyanidium caldarium
  Clone ID: LIB190-034-Q1-E1-D7
ggattcatggatcgaccacgcgtcgggccacgcgtccgcacacgcgtccgcctattatgaacgatcacagtgatcatatgagattaatgccaccattggctgcaacttgtattatgactttgtgtgccaatcattgaaagtcccgttatcgcaaccgagccactgagaatttaaaggaattgcatagggggagttcaggtttcatatcgttgatgacatgggcggggagagatactttagaagaatgtacagaagcttgtggaggtcaaggatataaaagtgaaaatagaattggcgtcgtgatgagctcttttgatgtcttactgacctatgaaggagataagttggtcctgtcacgacaagtcagccgaagcgtaatgaatgattttctcaaacagatgaagagtggaaagttcgttggaccgttgtcatatgtgaaggatcaaagtgtcttaactggatcacttccagaagatattcatagtattgcctattctcgtctcattttacagcgcttgcaaccgatactggttgctaatttggca

SEQ ID NO: 1740 - DNA, 537 bp, Cyanidium caldarium
  Clone ID: LIB190-034-Q1-E1-D8
ggaatcatgggatgaccacgcgtcggccgacgcgtgggtgagctattcatgcagttgttggcatttcagtcgtctacttggagtcattgtactcgcagctttattcaatgtcccaagtctatcaatattctaaaaaacaactatacctgtcgtacgttgtataaacgtagccaattggctcgagggatatcgttgcgtcaagtcccgaaagcagagttggagaggagccgaagacagtcgttttgatgccaatcctttggtcattgtaattgctttgcttggttggactcttcctgctagcattccttccaatattccacttttacgtggcactggattgactcaagcctttttcacttccattcaatccaacttggctcaatggcccaaaggtcctgccttggatgatcctttctggctttatattattctatggcatgttggactttttatcgtagtgttctttggtactattggatatgggattagtcagaaacgagtatagctgcaagtattcataaaatgctctcgtgtggg

SEQ ID NO: 1741 - DNA, 307 bp, Cyanidium caldarium
  Clone ID: LIB190-034-Q1-E1-E10
acgagtccgcacacgcgtccgcaaaaaactatacgtgggaatctagcttgtaaggacaatgtcgtctacttattacgaaatagatagggaaattattcatcccaatatcaatcccagaggacatacgataatcggtggtgatgacaggcacgttgccaggattagatccctatggcagcctttacaactcatttcttacaatactatgcagaacattgtacgttttgttcttttggtttttgggtggtgtctggatctatatctatttacaggtattgctgcgttaggtccatcgaatactgactcg

SEQ ID NO: 1742 - DNA, 439 bp, Cyanidium caldarium
  Clone ID: LIB190-034-Q1-E1-E12
gtcagcagaagaagagcagcaactgaaacgtactattttagaagcagaaagaaaccatacagcggaagaatatttattgcattcctatttagagaaggagaagcctgatgaagcggagcgtttcttaagagactatattttaaatgatggttgggtgaagaatatatacgaagctcccttattgaatggcgaagtacagaatatggaaatagatgaacaagatgcagagtttgtggaaaaacaagaagagtttgaagccgcttataattttcgatttgaagaacccaatgcaactgaaatagtttcgtatggacgaggcacatcatcttcttctcgagccaaggaaagcaaaagaaagagaaagagagcacgacaagagatgaggaagaaagataaaatagagaagagaaagagggaatgggagcctcagaagaaggaa

SEQ ID NO: 1743 - DNA, 286 bp, Cyanidium caldarium
  Clone ID: LIB190-034-Q1-E1-E2
cgcgtcggtcgtggctaggaatgataaatccatggataggaggaataatgataggaatgagtaagaggagtggtaggaagggaataatagcacgtggaatagtatggataataatgacaagggagttagtacagaggataacggaggaaacgatagtagaacacatgatggagactatacgatatgaaatacgagtcgatcggatgtcgataggatttatgtggttgacgagtgtgttgataagcgaacgggtgagtcacgaggtgtgaaacagtggacgaccatc

SEQ ID NO: 1744 - DNA, 152 bp, Cyanidium caldarium
  Clone ID: LIB190-034-Q1-E1-E3
aatgaactaggcacaaggatatcgtatctgcggtacaccatatgaacgagccagcaccgactgtttagcagaaacacagcactctgcacaaaagacaacatctacactatacagtgtgcggcctgcccaatagtagacacgacatccatcaa

SEQ ID NO: 1745 - DNA, 521 bp, Cyanidium caldarium
  Clone ID: LIB190-034-Q1-E1-E6
accacgcgtcggacaaattttggatgacaggcgtagacaagcaagctcaagaagaaagaagtagaggaaatgagtattttcgcaataaacagtacaaggaggcatgcgagtgttatactgttgctcttaggtatgcttataaagtttaagagtgctttattaacgaagaggactatagtaaagaaatgagtacagaagaccgggcagcgtgttttgcgaatagagctgcagcaaagctaaagttggaggactatgaaggggctttggaggattgttccgaagctttgagcttggatgaaaactattggaaagcaaagtaccgacgaaaggaatgctatttgaaactgggtcgttatgaggaagctttgaaagatgcaaaggcactaagagaagcacaacagatatcttcggaagaattacaacatatagaacagttgaaggagcgagacgatgaaagacgtaaagaagaagctattgccaagttgaacgaagtcggacatagtgttcttggctattttggt

SEQ ID NO: 1746 - DNA, 114 bp, Cyanidium caldarium
  Clone ID: LIB190-034-Q1-E1-E7
gatggaacaggcataagccagacgattctttcatgaagcccactctacaggggagtcaatcatatgcaatgtagatattgaacattcggactttcatacgcaactcttgtgtat

SEQ ID NO: 1747 - DNA, 428 bp, Cyanidium caldarium
  Clone ID: LIB190-034-Q1-E1-E9
cacacgcgtccgcccacgcgtccgcccacgcgtccggcagcggataagcatttggtgcctcatttgcctggttggttggatcgttggttgagtgactggatatcttttggtcgttttttataaagcagatatggttgcttccaatgaggaagacaaaccatggaataaaattctcaaatgcaatcctaaaaagagaaaatataaacgctgtttggtagaagacgagaatgtggagaacgatgtggaagccaacgttcgaagggaacgaattcgtgtactaagagaagctcagaaagtgaaagaaaagaccaactggttgaattggatggacaacattggagacaagactcctaaagaagaagaaaagaaggaaaatttggctatggaaggcttgaaacataactttgacattgaacaaaaggatgacg

SEQ ID NO: 1748 - DNA, 430 bp, Cyanidium caldarium
  Clone ID: LIB190-034-Q1-E1-F1
cgcgtcgggccgaagaaagaggagaaagatactttagggaagctttggcagctctacacaacagaagcagatagagatgtttctgctctagaaaaagagttggaaaaaggacagttatcctttgatccatcgttgcgtgttgtggtggctttctatatgggtttgtattttgatagtttttattcagatactcaacgacgagataaatggtggaaggaagcttgtgaagtaaagttggaaaagaaacatttctggcaatgggttgcggaagccaaactggctgccaatgttgcttaaggttgaagtcgtacgtattcgtcttgtgtggttattccttttctatattaagccacgtgggtgatggatagattagaaaaggaataaccttatcaagactcgaataaataaagattggataaaaagttttttt

SEQ ID NO: 1749 - DNA, 302 bp, Cyanidium caldarium
  Clone ID: LIB190-034-Q1-E1-F2
gaagctttggcagctctacacaacagaagcagatagagatgtttctgctctagaaaaagagttggaaaaaggacagttatcctttgatccatcgttgcgtgttgtggtggctttctatatgggtttgtagtgtgatagtttttattcagatactcaccgacgagatagggggtggaaggaagcttgtgaactaaagttggaaaataaacatttctggcactgggttgcggcacccacactggctgccactgttgcttagggttgaactcgtacgtactcgtcctgtgtggtcattccttttc

SEQ ID NO: 1750 - DNA, 492 bp, Cyanidium caldarium
  Clone ID: LIB190-034-Q1-E1-F3
cgcgtcggacagtggatgtcgattacaagttggtgatatttggtggtgcgttagggtatagttcggatgatatcaacaagtttctatggcctattcgaatttctcattcggttgatccgacagtggatgaaagtgcttatcttacagccgatggtaactatcgcgttggggaaggagcgggtccagcgttggtggagtcgttgatgtagaagctttgttattatagatttggagaagttcagtttgatcgcgggcatcctgctggttatgataaggttcgaggtgaagttatagcgaataagaacttcagactgcgttattttgaggagacctttactagtcgcaattggttggttcgcatttatcatgtgaaagacttgccacatattggataacctgtcagatcataccatccaatgagaatatatgtcatcccagagattccgacatgttgtggacaatatctgtatcaatcgtcccaccacttttttt

SEQ ID NO: 1751 - DNA, 451 bp, Cyanidium caldarium
  Clone ID: LIB190-034-Q1-E1-F4
cgtcggcccgcgcgtctgccacgcagtcggacgtttgaaaggcgtccagtatgaaaggagaaacgagtgtagcactgtctagtcgtcgaactcagcgaaacagcaataactgtgaaaatgcagtaaactagcagtatgacggaaagacccataattcttgactagataggtttagggaggagagagaatcatgaagtagaggaggtggggtaagagatgaaagaccactgcatgaggataaggaatctaactgagtaaggaaaataagcttaagctaattccaccagtgaagtaaagcctaagaaagagtaaattatgcaagcaaaggcatgagagaagtataatagcagaagcatgcttgaagaacaagaaagagatttcagaaagggaagaaaagtcagctatagagaatatgtgaaggagaactcacaccgaggagagcaccgaacga

SEQ ID NO: 1752 - DNA, 564 bp, Cyanidium caldarium
  Clone ID: LIB190-034-Q1-E1-F6
cggaatcatggaatcaccacgcgtcgggtaaacaacatcatattccatgtattgccgatggaggtgtatcctctataggtcatattatcaaaggactttgttgtggtgcttccactgtaatgttgggaagtatgttggcaggaacggaagaagctcctggtgaatatttctataaagatggcattcgtttgaaacgatatcgtggaatgggatcagcggaagctatgaagaaagggtctgcacttcgttatttctcggaagatgatcgggtgaaagtagctcaaggagtgagtggtgcagtaatagataaaggaagtatcaaaagatatgttccttacttgttgagcggtgttcgtcatggctttcaagatatgggcgtagtcagtgtagaccaactgcatgactatatcgaccaacgcaagttgcgtatgcagcttcgtacaccggcagcacaggtggaaggaaatgtgcattctttgtttacgtatgagaagtccaatgtttgattcgtctctgtgactagtatgaatatacgcacagactaaagataattctatttttggc

SEQ ID NO: 1753 - DNA, 340 bp, Cyanidium caldarium
  Clone ID: LIB190-034-Q1-E1-F7
gaatcatggaatcaccacgcgccgggcaagtaaaagcggagaacagagaggacgaaagccagattggaaccgagaagacgtccatacaagagaagtcagcagtggggaaaatcgggcaatgtcccgggaagtatgacccagtaatgaggagtggactaaacagaacaggaagtacaacgacggactgaacggaacttacggcaaaaacacgtgccaccagcagcggtaaaacgtgtgcagcacgcgtagagcagacgaactgggtgtaccggtcgagtagtacagtaagtgtccaacggatcggacacgagagaaccaggacagggatgaaatgcacaga

SEQ ID NO: 1754 - DNA, 453 bp, Cyanidium caldarium
  unsure at all n locations
  Clone ID: LIB190-034-Q1-E1-F8
tctaaagatatacgtggacaactaagctttaactttcagagggtcacagaaaatcctgaacattggttgatcaagtttacaagaagctttcttcgtattcttcgaaattagaactttccanatccttattgctagtcatattgtcttcaaccatgatacgcgagtaactaagttcctgcttccttcgctcctgttcttgtctttgtaacttttctgccttgagctgttctttgaaagccttttcaagcatcagatgtcgcaacaagtctttctctagttttacttacctgttttcttttaagtatctgctctctttcatgatcttctttttcctgtgccaagtttggaaacgcttccttcttcgacttctcgagtcggttaattatatcattcgtcctcttttctacagttatactcttaacacgctttctatcgtgacacacaacttgtcct

SEQ ID NO: 1755 - DNA, 430 bp, Cyanidium caldarium
  unsure at all n locations
  Clone ID: LIB190-034-Q1-E1-G1
cgcgtcggcccacgcgtccgctgaagcacagtttggcacttggatcactatagtaatggtactttgctattctttggaaactccaatcggtatatctattggtattggtattgcacacacttatcaggaaaactcctcggcatctttgttaacgagaggcattttggatgccatctccggtggaattttaatatacacaggattggtggagttgttgacttattggtttacgcgcaactcgaactttttaagacgcanagccatatctatttttagtattgtgggatttgtctggttaggagccatctgcatggcgattatcggagcgtgggcctaagaataaaatttgtttgagacgtcgtggtgcagatgactcgcatgtttggtacttggttcaagtctgacaagagaaaacatttgttgctacttc

SEQ ID NO: 1756 - DNA, 416 bp, Cyanidium caldarium
  unsure at all n locations
  Clone ID: LIB190-034-Q1-E1-G2
gcgtcggcctgttcgctacnacatttatcaatacttatatgtttattgcatcgactgcacacaatattcaactttatattatctttttaaccttggaaatgcaactagttctcgtcgatatgcatttctttggagctatcagttcagttcctggtggaatactaggaatgctgtgttccataagtgcttgggttctatctgccactattgtcatcaacgacagttttggaactacggttattccgaatccggaactgaaggaccttcctattttccgtgattgggtaaagatgatcaaaggagagaagaagtagttgagttgttgcttgtctagagtttgtttgtcttgcttagttgctgtggagtgtgtttagtcaactgtcgatattcgacattatttcgtacttttataaata

SEQ ID NO: 1757 - DNA, 390 bp, Cyanidium caldarium
  unsure at all n locations
  Clone ID: LIB190-034-Q1-E1-G3
ccggtacgacaacgcgtcggcacgactctttgtggttcgcaacgggaagttggaagaacttcgcgctcaagttcctatgaatatacaaggtaagccaagaaggcttgtttgtgcgcaacacacagttganactactagtggcactattgacccggacgacttgagacgacaccaacaactcttacgaagaatgcgtttcggaaaaagttaaaagtttattccagccgttccanacgatcgatcatttgttccagcgttttcaattcatgttcaagagcttgcaagagttcgcgttgatttcgcaaatactctttcatatactttagggagcacttggacccatgaacgattgaaaccaacaattcttctctgaccgatgccaaagtacag

SEQ ID NO: 1758 - DNA, 197 bp, Cyanidium caldarium
  Clone ID: LIB190-034-Q1-E1-G4
aaagaacgtatcaaggaaaactttgatgtcttattcgaattgagtccacacgatatgaaggaattggaagccttagataagaacataatcctcaatcatcaaaaggaatattggggtttcaatattcacgcttgagagagtctttgtcgtacaataaacaaatttcttgttgttgctgctgctgtgaaaaaacatca

SEQ ID NO: 1759 - DNA, 200 bp, Cyanidium caldarium
  Clone ID: LIB190-034-Q1-E1-G5
accacgcgtccgtccttgcaattggtagaacaatagtaagagagagagaattggctctcgttcttgtgacatatatatatatctatatatacacatatacattaggctttagatatttacatctacagtatccaatggtatttcggaggtttgtatacattggaagagtcgtcgtggtcaaccatgccgaccacccaggc

SEQ ID NO: 1760 - DNA, 480 bp, Cyanidium caldarium
  unsure at all n locations
  Clone ID: LIB190-034-Q1-E1-G6
accacgcgtcggcccacgcgtccgggcataacattgaaatgttatggaacgtctggtgtcggcgttgctaagattaaggaggaagttaacaagtttctagttccagtttcttcacagttggaattggagaagaacgatatttgggctattcagttggtcgtgagtacaagttacaataatgaagtatccaatcattttgtagataagcagaactgggtaatcgataccagaaaaaaggtttcttcttcgtcatctactccttcgcatgatatgaattactccaactccgatcaagagggtctccgtatcggccggaactgccaacttgtantttgctcgatagaaaacttggaaaagttcttgggtaaagaaatttatgaccanatccagaaagctcgctgctcggagagggaanactttttgaccaatgtgactcctctatccagtctgataggaacgttgttcgaacatggatgggca

SEQ ID NO: 1761 - DNA, 512 bp, Cyanidium caldarium
  Clone ID: LIB190-034-Q1-E1-G8
ttgctgtcatggtatccgaagaggaagaacttccaattatagtggaaaaacacaatagaggaaaatatggcatcgcatttgatccgcttgacggctcatccaatatcgactccaacgtgaccatcggaagtatttttggtatcttccgattgccagacggtgagagcatacagacaaccgatgaagcttgcagacaaattatgcaacctggaagaaatatggtggctgcagggtatgcaatgtatggaagtgcaaccaatcttgtgttgtcattcggtaacggcgtccatggattcacgttggatccttctcttggagagtttgtgttgacacatcctaatataaggattccacgcataggtaaaatatattctgtgaacgacggacattgcaaaaattgggataaaccagtggtacaatatattcagtccttgaagtctcctcctgaagggaaatctccttagtccttgagatatactggctcgatggttgcagacgtccatcgtactttg

SEQ ID NO: 1762 - DNA, 481 bp, Cyanidium caldarium
  unsure at all n locations
  Clone ID: LIB190-034-Q1-E1-H1
gcgtcggcactaatgcaagagcaaccaaagaagannananaacaagataaaagccaaatcggccttgctccaatattttcttcaaaatagagttgaactaccagtcgacacaaagcttggacgactccaagatggcttggtaaccttgttctcgacggtggctcgcctcgacagaaaaagaaaggaccagctggctactataagcaccaatcgctagttgctacattgcaagtgccacaaatgtttgctctttatcgactcacacagggcctagtctttctctttctgtgtcgacgagtgcgtaaacatgacgtcttggtaacgcaaccccttagtggcacacgaagtttcctgtgcagtgtcggactatgtgaaaagcacagcaaagtgggaaagagtttcgactccttgntgtttctccactagcaatattgaaccaaagtgttttcgcacattttgcactgaaacgaatggctgactc

SEQ ID NO: 1763 - DNA, 245 bp, Cyanidium caldarium
  Clone ID: LIB190-034-Q1-E1-H12
actcagcatgtagacaactcctaacttcttgatgaagtgtcttaaactgccgtagtatcataaacatcacaagcctttccatcgcagtacattttcattgattcgcccagaagactcaccttctactcgaggatataagtttcaagtattactttcgcatattctttatgttcgatggaatttttgtaagcaactgggagaattgagtatatttcgccagaatttgggtaacgagattccaaatt

SEQ ID NO: 1764 - DNA, 345 bp, Cyanidium caldarium
  Clone ID: LIB190-034-Q1-E1-H2
tagcatacatgacattacagtgtctaatgtttcagatgctgcctttggagaatggagagcattatcggcttcaagtagagcgaaagaactggaacacagaagaaacgtcaacaaagcgacaatagatagtctcaagaagactcttaccgaaaagtcaaggcttacattttctggacaacttgaagaagtctatcgaaggaatttaaagatattcaacgagccgggtgacactgttggggcacttcactttatgaaaaattaatatcaaaacagtaatagtgtgattgtgtgggagctttattgtccgcttgttgtctaacccaaatagttgttgttgttgtaaaa

SEQ ID NO: 1765 - DNA, 412 bp, Cyanidium caldarium
  Clone ID: LIB190-034-Q1-E1-H4
acgtacgggtgaatcaactcaagctgaagaactttcaggcaacccgaatggtcatcaggagatatagaaaacctggttttactcgatcagtattcttcctatgaaagtacgattgctacagcttcgggctataaacttaagatgttggtgattatctttgaaatgggtgtagcttttcactccgtaattattggtctgaatcttggaataagcacaggatcgacattccgtacgttgtttgctgctctcgtatttcatcaattctttgaaggatttgctgtcggtactactgtttctgaagcccagtttggcacttggatcactatagtaatggtactttgctattctttggaaactccaatcggtatatctattggtattggtattgcacacacttatcaagaaaactcct

SEQ ID NO: 1766 - DNA, 469 bp, Cyanidium caldarium
  Clone ID: LIB190-034-Q1-E1-H5
ggaattacgggatcaccacgcgtccgacctggagtacatgaatcctacgttatgtgcgagtgatgaaataagcctaatcatcatctggctggaaccttaactgaaagtgcaactcgtgaggaagaagagacaatcgaacgaattgccagatagcgtcctgttatggacgtggaaacgttcatagcttgtcgtactgcggatcatgctttgaattttttttcttatacaagatacgatgcttttggtcttttatgtcacggacgaaatcttggtttcgactactgcatcgtttattctgtgtgttttgtatgtgtgtctaggtgtgttcgataaaaatcacctatactctggtgacaattgccggtgtgacgataccttcagttgactaaagtttctatggaccatcagattcacgaggtaatatgagtaagacacgaatgaagtagggcggactttctaaacaatgcat

SEQ ID NO: 1767 - DNA, 481 bp, Cyanidium caldarium
  Clone ID: LIB190-034-Q1-E1-H6
accacgcgtccgcccacgcgtccgggcttcatctggaggaggaggaggagatcgtcttcaagtagttccttcaagaatgacattgacgcaaataaaaggtcgtctatcaggagcaaataaagggcatagtatgttgaagaagaagagcgatgcgttaactgttcgtttgcgttccatcttgaagcaagtactggagaggaagaatcagtcgggagatttatgtcgtgaggcgcttatttccttagcagttgccaagtatatagtgggagaagagttcaaagtgcatattttggaaaatgtagataagagttcgttgaaagtgtcgtttcactcggagaacattgccggtgtgacgatacctttatttgacaaagtttctatggaccaagatagtaccgaagaatatgaaaaagacacgaatgatggaagaggagtttcaatcaaggcttgtccaatcatcagtttcactcgtttgtgtcct

SEQ ID NO: 1768 - DNA, 168 bp, Cyanidium caldarium
  Clone ID: LIB190-034-Q1-E1-H7
accacgcgtcggcctcaacgtccacactagaaagaccaacgagccttgtagtatttaaaagtgaacaacgtgattccttcacagttgtctttgcaaaactagaatcctgtgtaccgtggaatattgccatattctgtttttcttatataaacacttttattttcttgt

SEQ ID NO: 1769 - DNA, 217 bp, Cyanidium caldarium
  Clone ID: LIB190-034-Q1-E1-H8
ccacgcgtccggctaagaaggtcacattatggaattgggagcatcgaatggttatacaagactttttagggcatgaaaaaggagtaacttccttggatgtgagcgtcatttaaattactttgtagtttatattccgagactagtttgttttgtattttcttcctttcggctcctatgagtgagtattaccgcattaaacgaaaatgttttctttctc

SEQ ID NO: 1770 - DNA, 436 bp, Cyanidium caldarium
  Clone ID: LIB190-034-Q1-E1-H9
gaaagaaaagtccggtaagagagtgcgtgtgactgtatggcatggctctcgaaaggatttggcttgtctcaacacagtttgcacgcatattaaaaatatgatcaccggggtaaccaagggctatcgatacaaaatgcgcttggtatatgcacactttcctatcaacgttactgtgtctgacaatggcgattatctggaaattcgcaactttctgggtgaaaagagaactcgtcgagtatatatgttatctggagttgtgtgcagtcgctcggaaagtgtgaaggatgaaattattctcatagggaacgacattgagcaagtggctcagtcagctgcgaatattcatcagtcttgcctagtgaaagaaaaagatataagaaagtttctcgatggaatttatgtttctgaaaaaggccctattcctgaatatgattaa

SEQ ID NO: 1771 - DNA, 366 bp, Cyanidium caldarium
  Clone ID: LIB190-035-Q1-E1-A1
acccacgcgtccgcgcagcgattccatgttgaaagagggtacacgtatattgtccgatctcaagtttcaggtgcttcaagatggaaaacctcaggtgataacttcggatcaagtattcggaggaaagaaagtagtattgtttgggttacctggtgcctttactccaacctgctctaggcagcaccttccaggctttggacagaaggttgatgaaatcaaatcgaaaggagtagatacagtcgcttgtttagctgtcaatgacccttttgtattacatcagtgggcagagtcacagggagtggcaggaaaaattctcatgttagcagatggtggtgcgcaatctgtcaagaaacttggactggatat

SEQ ID NO: 1772 - DNA, 341 bp, Cyanidium caldarium
  Clone ID: LIB190-035-Q1-E1-A12
atcatctaattttttttttggggaaagcggtttggctcagagggctcttcctatttagggatatatggttgtcggtgtatacaaccataaatttcgccaatacaatggacgaacctttctttaagtttttgtacaatggtttccactaaattattggccctgcttgaaagttgctaggtgttccagaccaaaatcttcaatttcaggttgtcccccatttttgcaaaaactgacctcgtctgctgtgtagacacgtgttggtgaaatattaacatacaaccgttctgggttctaaagggaaaaacagttttagacgatacaatatacacagacacactcat

SEQ ID NO: 1773 - DNA, 313 bp, Cyanidium caldarium
  Clone ID: LIB190-035-Q1-E1-A3
acccacgcatcgacaattgcattctactttttattaatgaagtaaatttcaatagaatctggcataaaacaacttatttggaaaaaatcaatattgtccacatgtcacaacaatgggatccgtacgtaatgggcgttttcattcgattgtctaccactcactctctctttctccaatctggcacttcgtttggattcaacgtgaatagcccaccttatcacagtatcagaggaatagatggctatcattggtatagccttgcagccagtacccttgttatatagtggtcattccatgccttgtttacattcaa

SEQ ID NO: 1774 - DNA, 424 bp, Cyanidium caldarium
  Clone ID: LIB190-035-Q1-E1-A4
ccggtcgaccacccgtcgaagcagtgaagaaattgattggcttcctccgttcgtttgcaaagggtaaaacctttttaaaaattcagttggaacaaaataacggaaaaaatggaatcctaaaacatcattaaaaaaaggttaaaaaaaggaaaccctttgaatccttcccctttaataaatcactttggccccactgcactggcattattcgactcgctcagcagttacctgtggttgatgtagaagcggtcaatttgttagaagaaaaacagtgtcaatcttctgccgattattctgttccagttttcagaagtcgggatcatgtccgagtctccctaagaccgtttcaaattgtctctcttcaatttcagcttggttgaagttatcaaaatttgttgtttcagtaaattgtccttcatttcgg

SEQ ID NO: 1775 - DNA, 371 bp, Cyanidium caldarium
  Clone ID: LIB190-035-Q1-E1-B1
acgcgtccgatttattggctcgagcatttgaatatattgctagtgaaactcaaggagttgctacagacttggttttaaaagttatctccattcttggatcttctgtaggctactctggaattgttggaagtcaagtcgttgatattcaatcagaaagaaaggaggatatcagtgtcgaagatctcatttggattcataaacataagactggggcattattgaaatgttgtgtagtaactggtgccttgttgggtggagcaaataaagaagatgtttcacgtattggagaatatgcagaaagaattggtttggcctttcaagtagcagacgatatcttagacgttacttcatcgtttgaagaattgggcaag

SEQ ID NO: 1776 - DNA, 286 bp, Cyanidium caldarium
  Clone ID: LIB190-035-Q1-E1-B11
gtccggaaaagcgaccgcttggtagcagttgtacattcaacatcatcaaatgccaaagggaggaaagaaagattcttcaaagaaagaagccacaagtaaacctgcagcagcagatgctacaaagacgacagaaaagtctggtccggaagccaagttgaagggaactggtgcaaagaaacaataaaaagttgactatgcatgtgcagtcctgttatgttttgtgagttctgtttgatagtttccagctattcttttggtagtgaataaagagaaaattttttatatt

SEQ ID NO: 1777 - DNA, 225 bp, Cyanidium caldarium
  Clone ID: LIB190-035-Q1-E1-B2
ccatttgtcaagagccactcggagccttgcggaggacgttggtttagcagttagcaccactcttgggtattctgtacgctactctggaattgttgcaggtcatgtcgatgatattcagtcagcaatgttgggtgatttcaatgtctgcgactgcatttggtttgatttgtataagactggggcattattgaaatgttgtgtcttatctgatgccgtgttcggtgg

SEQ ID NO: 1778 - DNA, 375 bp, Cyanidium caldarium
  Clone ID: LIB190-035-Q1-E1-B3
acgcgtccacccaagcgtccgagcgcacggaaatattttctagtcatgcaaatatttgtgaaaacgttgacaggaaagaccataaccttagaggtcgaaccttcggatactatacaaaatgtgaaatcaaacattcaagataaagaaggtataccccctgatcaacaaaggcttatatttgctgggaaacaactcgaagacggaagaactctgtcggactataatattcaaaaggaatccacgttgcacttggtattgaggttaaggggaggtattatagaaccaactttggcagcattggcgagaaagtacaactgtgacagaatgatatgtcgcaagtgttatgccatattgccagcaagagctcacaactgt

SEQ ID NO: 1779 - DNA, 399 bp, Cyanidium caldarium
  Clone ID: LIB190-035-Q1-E1-B5
gacccacgcatccacggacgcgtgggcggacgcgtgggtgttgcgtcatgcaagcacgacatggctctgcaccggtagatgtcggagttgagtggttgagagcatgaggagcttggagttgttatactttgttgatctttacagtaagaagtggaatatgaactagtctagacctggaaccctatcagtctgggtctactattaacattctacacgcgacagtcaccgttggtgtgtttcactggataaaacggagtccttttcctaccaactgggtagaagactactacgtcgataagtaaacgtggtgggagcaaatccataggaagaggcacaagactccgaatagaaagttcttcaccgctgtagtggtcgcactgtacttaactgccgttcaat

SEQ ID NO: 1780 - DNA, 386 bp, Cyanidium caldarium
  unsure at all n locations
  Clone ID: LIB190-035-Q1-E1-B8
acccacgcgtccgcccacgcgtccgcccacgcgtccgcccacgcgtccggtgcaaaatccgattctgcagcttttggaaaaggatgaactcgctcaactttgtctcgtcttcttttcttaactgtcatagtatccagataaagacttcacgtagacaagtattgaggccatacagacatgttgtgagtagctccaagtctctgaaactttcgtgccaaatagaggataaagacacgtggagtcgtcgcaagtttcttctcacttcacttggatttgtgtcttctgcgctgttcctttattctcaagattcttgggcttccagagactatgcaggtgttggttatttgggcggnggtgataaggttgacataaacaacgctaatatc

SEQ ID NO: 1781 - DNA, 414 bp, Cyanidium caldarium
  unsure at all n locations
  Clone ID: LIB190-035-Q1-E1-B9
gtccggtcaagtgatgctggaggaggaaaggtgaggcgggaggttggtaagagattactcattgtgcttggcctgaaggaggatgagcactatctcggtttctctcaagaaacccggatatgattcctttctagggtttgttcccatacaaggtattggtttgtcaccaaggaaactattcaatacgtgttgtgctcgaccgangagagcttggacctctccaaccaccataaagtgtatccaagacaacctccatgagtgggttcgttgtaaagtatttcgttgtggagaaaaacatatatttctaggccctaacaacagcttaactggttccaatgcactgcctatcgaaatagaaagccaactggatgccgacttgttgcgttctgcactcggattctatcgcaagcaaag

SEQ ID NO: 1782 - DNA, 390 bp, Cyanidium caldarium
  Clone ID: LIB190-035-Q1-E1-C1
cacgcgtccgaccaagcgtccgcccacgcgtccgcccacgcgtccggaggagagaatcgtcatgcttcggatctcaacgaggatacttgtcactacagaacggatagtagagtacccgaaaatgtcatagttcgaaaagatacaaacgtgtcttttttggatttgtgtctttttgcctttgatcttttgattagtcgtcttagacacttttcggagccttcttgtccagcttccataccagacacggatgactatgcactttttgtgacgtggaataagaaaggtacagaaggtgagcgtgcacagttgcgaggttgtataggaacgctttcacctttgaaccttcgaaaagggatacatacttatactctagcaagtgctttcagagat

SEQ ID NO: 1783 - DNA, 397 bp, Cyanidium caldarium
  Clone ID: LIB190-035-Q1-E1-C2
cacgcgtccagcgaaacaagagaagggaagtaaaaggtaagaaagaggaaaggtttacgagagaaggaagtagaaagaagagagtgtaaggcggcgtcataatagaaatccgaaaggagtagaagaaaagagagagaagaaagaaaagaagagaaaagccgtactgaagaccgacacaggtactcgaggagaaaggagacccaaattaaggtgagagaatggacgataaggaactaggcaaaaggatatggtatctgcggtagaacatatgaaagaagcagcaccgactgtttagcaaaaacacagcactctgcagaaaagagaaaatgtaaagtatagagtgtgcggcctgccaaatagtagagaagaaatcgatgaaagtgaaagcgagtaaaag

SEQ ID NO: 1784 - DNA, 384 bp, Cyanidium caldarium
  unsure at all n locations
  Clone ID: LIB190-035-Q1-E1-C3
cggtcgaccagcgtcgatgtaggtggtggaaggcgtaactttgtgggtttccnacaagatgtctttaaaattcgtgaatcaaaggctttcaacccccgtatggacaacccgtggatttacccaccggaataatgtataccttgaaccaaatgtcgtaaattgtcaattttgctttttctgttgtagtcattgcaatgttctcccaatttaccttttatcaataccgtgactttaattgtgctttcaatgggcattgggattacgccacgcataccaaattgtctggtcctgtgggttattgccgttacttcattgctttggggagcatttccatcgtacttttagctattgttgccgtagctacttttggaacgctgtattttg

SEQ ID NO: 1785 - DNA, 395 bp, Cyanidium caldarium
  Clone ID: LIB190-035-Q1-E1-C7
gacccacgcatccacccacgcgtccgcccacgcgtctgcggacgcgtgggtggttgggtaggaggaggcttggtcatatatgtgataatgattatggttttatgtagtgatatcaggattatggaacgattctatgataagatgagtgagtgtagttagtagagtttcagatcatgtatttagaggaaattgataaagatgtgtaatatgtgaatggttgtttggttaacattcaaatgtagtattcattaggtcttattggaaagttattgtaagtggaaggacagatgcgtcatctaggattgaatatttacacataatttgagtgtttagatttaaataaggaaaagatatagatctgaattgaaatgtgatttgataagatatatattttg

SEQ ID NO: 1786 - DNA, 218 bp, Cyanidium caldarium
  Clone ID: LIB190-035-Q1-E1-C9
tccgctactatcaacgtgtttttctgggcttggtggttggttggtgctatcgttgctactgcggcaagaccttctacgggaatgctgaacttgcacaacaacaggacggaagtacacgcagtggaggccttgctttgggccaacatgtgcttgtactccttcaatatcatcttggcctttttgatataccgggttggttaaagcggtctctggccccc

SEQ ID NO: 1787 - DNA, 395 bp, Cyanidium caldarium
  Clone ID: LIB190-035-Q1-E1-D1
accacacatccgattacgcctgcctcttgcagaaactactcttcatcgactaagaaagtcaaacccgctccaggaacgtatgcaagtcatacacgaagctatcattgtcctatgctgagtttttgcacattccaggtaagcatctcgctgatacacatcacatgtggttcaacatgtcataaagaagttcaaagatgcgtacactgtgggccaccaggaatacttctagagcttcatccatagcgtatttagtaaagtatacagtaaaggaagaggtagaagaagcaaagggggactcagagcgagaatgtgattaatctagtgggaaatcgaccaggaaccaacataaggtatcagagtaagtatcgaaggaaaaagagaatgagaaaggggta

SEQ ID NO: 1788 - DNA, 397 bp, Cyanidium caldarium
  Clone ID: LIB190-035-Q1-E1-D10
gtcatgtcgtcttcaaatgagtccatcgagacgttattgccaaagacgtttcctaaagaaatccctacttcgtaatggcccgtggaagcacttttgggcaatccagtactcgcgctcgacgtgtatttatatcttgccgtactccacttgaactttaatgcttcaagcgtttcgttgatcatcggtactacagtcggcttggtgcttctagttacgtcgtatcataaaactgcatatgccaagtggtctaagctcgatcgcacaacagagcaaccaaccaagagctctttcaagggtaatttgtcggcataccgaagtggagttgagagtcacctatggctcctggaaagatctcggtcagttacagtgtaatgataaacaacgcaatatttcaagc

SEQ ID NO: 1789 - DNA, 312 bp, Cyanidium caldarium
  Clone ID: LIB190-035-Q1-E1-D12
gaagagacgagtcatcggaaacttgtggagtttgttgctcgtgcaagttcagaatccgacaagttgttggtgaacgatagcgatcgagtatttcagtatttgtattcgacgttgttcgggacggagaccaaagacgatcctacaagccgacgagtggatattatcgtcgacaatgcaggtttggaactgttttgtgatatgtgtttggcgcattatctcatcgcctctgggatagcggaccaagtagttttccatttgaaagcatatccggtgtttgtttccgatgccatggaaaaagatttgtggtatatg

SEQ ID NO: 1790 - DNA, 400 bp, Cyanidium caldarium
  Clone ID: LIB190-035-Q1-E1-D3
aaaaaagaggaagagaagaaagagaaggaggaacaaaagaagtctttcgaacagttgtgcactgttattaaggaaattcttggagacaaagtggagaaggtggtagtttccgaaagacttgcggaatctccatgtatccttgttactggtgagtttggttggtcggccaacatggaacgtatcatgaaggcacaagctttgcgtgattcgtccttggcaatgtacatgtcatcgagaaagataatggaaattaatcccaacaatgccatcatgcaagaattgcgtcgccgtgtggaagcagacaagtcagacaagaccgtgaaagacttggtcaatttattatttgacactgcattgttgacttccggattctctcttgacgatccaacgtttttgcctc

SEQ ID NO: 1791 - DNA, 387 bp, Cyanidium caldarium
  Clone ID: LIB190-035-Q1-E1-D4
cgcgtccaataaaggaggaagagaagaaagagaacgaggaacaaaagaagtctttcgaacagttgtgcactgttattaaggaaattcttggagacacagtggctaatgtggtagtttccgaaagacttgcggaatctccatgtatccttgttactggtgagtttggttggtcggccaacatggaacgtatcatgaatgcacaagctttgcgtgattcgtccttggcaatgtacatgtcatccagaaagataatggagattaatcccaacaatgccatcatgcaagaattgcctcgccgtgtggaagcagacttgttttattagaccgtgaaagacctggtcaatttactacttgacactgcattgtttactttcggattcactcttg

SEQ ID NO: 1792 - DNA, 426 bp, Cyanidium caldarium
  Clone ID: LIB190-035-Q1-E1-D5
acccacgcgtccgcccacgcgtccggttggtaagcgtgcacatgttcgcgtaaagttgagtgaaagtcggtatagattcgaggacctcaaggggagactatagtgcaacagaagaacatagataagcagtcatttagcttcacaacaccacagcacgttcttgctggagattcgagtttggcttccaacgatattcactggcctcctgcaagttatcacttttgtttcgaagctagtcctcttcgtcctcctcaaggttcacctgtaccaagaagaaaggtaatactgaatgtacaaactgattttgtggcgtcggattatacggatattgcaaaagtgcaacacttgaatagtttggaagctgccttgcgtcggatggaagaacaatttggtcagatagttgtaaaactggaaaatgttaaaaac

SEQ ID NO: 1793 - DNA, 265 bp, Cyanidium caldarium
  Clone ID: LIB190-035-Q1-E1-D6
gacccacgcatccagttctacagttgatacctgtactagtaggaagtgccgtttgagctcaacttgttctgagtgcggttcaagttgataacgttgagaacactcgagcatctgaaagtctcgcgataagccaataagtttctcacgcaactttctaaaactgtgtcatgatctgattgaataaccgaagaaggcttctaagtatcatcactgcactctagcgggaacccacggatgactcaaggcaggaccacttcgaccttca

SEQ ID NO: 1794 - DNA, 390 bp, Cyanidium caldarium
  Clone ID: LIB190-035-Q1-E1-E1
atggcgattgggaacgagaaaggcgtcgacgacgaaagaagatcgctgtaggaacaacgacataaaatgtctgttttattacaaagttcggatttccaacacattcttcgtattctgaataccaacattgatggcaagaggaaagttatgtatgcgttaaccgccataaagggtgtgggtagacgtttctccaatttagtcttaaaaaaggcggaggttgacctgagtaagcgtgctggagatttgacgtcggaagagattgaccgcatagtcaccatcatgcagaacccccgacagtttaaaataccagattggttcctcaacagacaaaaggatgtgagagacggaaaatactcgcagcttattgcgaacaatctcgattttaaactg

SEQ ID NO: 1795 - DNA, 346 bp, Cyanidium caldarium
  Clone ID: LIB190-035-Q1-E1-E10
gtccgcccgcgacggaagaactagaccgttatatgctggagacagagaaaaaatggagcgtgaagagaagcaaatggaagtgcacgtgttgcaagttcaactcacaaagagactgtcagagaaactgcttctagtcgtgtcgagcttccgaaagaggaagaaatcaacgatgaggagcgagaattgcgagagttggaacaaagtatggctgtatagttttggaaagcagtgttagccacttaagagcctgaattttaaaatatattacatatatatccacagtaaaagttgcgtgtggtaataaattgtctgtagtctttcgtcaaaaaaaagagacaaaaacaag

SEQ ID NO: 1796 - DNA, 410 bp, Cyanidium caldarium
  Clone ID: LIB190-035-Q1-E1-E12
gtccgcccacgcaaccgcccacgcgtccggtaagatcgttttatggtggctgaggacttgacctttcagttctttgcatttttttcttggactcagagaacacttttcaaacacacctgtaaatgttcacaacataaattcacgagtcttccatgcagagtatcgtcagcgaaattacctgcgatacggacttttcctgttgttaccatgggattgaacgactcgtacagagaacgactaagtatattcgatcttaccgtagaagaagtcgctgaagactacggcctacctttggaatacgtcatcgatgtacttatcagtaatggtgtggaagaacctgtataccctaacgacgttctgtcaagccgagtaaaggacagtagaaaggcggaagtcttagaaaccctttc

SEQ ID NO: 1797 - DNA, 413 bp, Cyanidium caldarium
  Clone ID: LIB190-035-Q1-E1-E2
ccggtcgaccacgcgtccgcgcaggtggaaggatgcttgagcggcagaagaatggtgtgtttgcatccttgtaacaacactacttgtcacttggttcaaaatatgtttccggaaaccacccacgacaatgtttctagttatcccgaaatatgtagacagctagagaagagcaaagtgtgtgcgcaagtggtgtgtccaaaaccccacagagtttccaacgcgttgagtgcgttggaacttcaaaattttaagcttggagagccttgttttcagacagcagaggcagaaaactacaacagagactcgactaggccttttagctgtccctggtccaacacggaggagcctgtagcaatagtaggggccttggacgtggaaagtcatcgagacataactcctccagaaaggacaga

SEQ ID NO: 1798 - DNA, 359 bp, Cyanidium caldarium
  Clone ID: LIB190-035-Q1-E1-E3
attagtcgtgatttcgtctatggcgtttacgagtttctttccttgccacgcgctttccaatacttgcagtaaattctccaactgttctcgtagaaaaaagactctaggttgggttgaaccttttctgtggagatggaacaaacaacttgtcataaataagcagagaagagctttggggtcgaacaacgtgagcattctatttagtcttgcggtgttggaagatagtcctgggtcgtcttctgtttctaccagcaacgactttcataacggcaaagaaaacaaactgagtctagaacagcttcaactgaataaggaatatgaagctgtagtaacaaaagtaacagaatatggcgcctttg

SEQ ID NO: 1799 - DNA, 407 bp, Cyanidium caldarium
  Clone ID: LIB190-035-Q1-E1-E4
acgcgtccaagtagtcgtgatttcgtctatggcgtttacgagtttctttccttgccacgcgctttccaatacttgcagtaaattctccaactgttctcgtagaaaaaagactctaggttgggttgaaccttttctgtggagatggaacaaacaacttgtcataaataagcagagaagagctttggggtcgaacaacgtgagcattctatttagtcttgcggtgttggaagatagtcctgggtcgtcttctgtttctaccagcaacgactttcataacggcaaagaaaacaaactgagtctagaacagcttcaactgaataaggaatatgaagctgtagtaacaaaagtaacagaatatggcgcctttgtagacataggtgcagtaaagtaacgcttaatgcatgttt

SEQ ID NO: 1800 - DNA, 391 bp, Cyanidium caldarium
  Clone ID: LIB190-035-Q1-E1-E5
gacccacgcgatccacggacgcgtgggagatggcgcactatcaacattaccgagctagtacagcgggtatagctttgggagaagcactttctgaactcaaggaacagaacctctttacggaagcggaagaagatgtgatttggaggaagtttgaccgtgccatgacagaagcccttgcgtccaacgttgtggatacacaccttacgttgaaagggagtcttcatcactagcgactctgtgataacgtgtggcaattcttcgtgaaagacgcacaagtgacatttgacaaaaggtcggactttacgcccgctggttatctgaaagtagttgcttgtgattatgtaaagcctgtcaaccctaagtccagtcaggtttgaagcctaatcgttgg

SEQ ID NO: 1801 - DNA, 337 bp, Cyanidium caldarium
  Clone ID: LIB190-035-Q1-E1-E6
aaccatgctctccatttagagatcatcacccagtatgtgcggggatgacaatttcatttggagtgttgcgacgttatggctatttatgtaacgagacgtgatgagaaaactgagtgctgatgtagtatctcgacaaacccttacaattgccagcgcgttcagtgccttcgaacttcacaatttgaagcttggagagccgtgttttcatacatcagacgcagaaaactacaatagagactcgactaggccttttagctgtccctggtccaacacggaggagcctgtaacaatagtacgggccttggacgtggaaagtcatccagacataactcctcca

SEQ ID NO: 1802 - DNA, 377 bp, Cyanidium caldarium
  Clone ID: LIB190-035-Q1-E1-E7
acggacgcgtgggaaaagagagagaagaaagaaaagaagagaaaagccgtactgaagaccgacacaggtactcgaggagaaaggagacccaaattaaggtgagagaatggacgataaggaactaggcaaaaggatatggtatctgcggtagaacatatgaaagaagcagcaccgactgtttagcaaaaacacagcactctgcagaaaagagaaaatgtaaagtatagagtgtgcggcctgccaaatagtagagaagaaatcgatgaaagtgaaagcgagtaaaagatgaggtatagagaatggcggtcctaacagtaaggatccaaaggtagcgaagtaaatagacgtttgaaaggcgtccagtatgaaaggagaaa

SEQ ID NO: 1803 - DNA, 332 bp, Cyanidium caldarium
  unsure at all n locations
  Clone ID: LIB190-035-Q1-E1-E9
cccgtccgcccacgcgtccggaagaactagaccgttatatgctggagacagaagaaaaaatggagcgtgaagagaaagcanatggaagtgcacgtgttgcaagttcaactcacaaagagactgtcagagaaactgcttctagtcgtgtcgagcttccgaaagaggaagaaatcaacgatgaggagcgagaattgcgagagttggaacaaagtatggctgtatagttttggaaagcagtgttagccacttaagagcctgaattttaaaatatattacatatatatccacagtaaaagttgcgtgtggtaataaattgtctgtagtctttcgtc

SEQ ID NO: 1804 - DNA, 390 bp, Cyanidium caldarium
  Clone ID: LIB190-035-Q1-E1-F1
atgtgggttgtggagtaagtgcgcttggcagcaaactaaaagatggcaagaagaatcatcggagcttatatgtctgacgctactgtagcgtctctatttagcgtgaaaatgttgttctaccttacaatacttgcgttctctatcactattgtgggtcttatgggtaagagttccgacggtatttgggttcacagtgttccagcgaaagacgaatattgtgcatacaagtcttcccttcaagtaaaccaccacggcatagcttcctattgcaagtatatcatggctgtagcagctattggtttggttatcagcttcttcgagttttggtatgcattcctcggaattttcttcaagtggcaacaaaagttgtggtatattgaatctgctatc

SEQ ID NO: 1805 - DNA, 334 bp, Cyanidium caldarium
  Clone ID: LIB190-035-Q1-E1-F10
gagatgcacggctggtggctatggagtttgttgttggtctgtttgtgtttgttcccactatccaactccgttcaacaagatgaagcgtttgttcctattggtcctcttcgtgaaaaggatgagcacgcaacacagccttcacaacctgttgtaaagccacacggtagtaaccactggaagccgctccagtgtactcccaacaaggaaaaagcagaggcattgatacaaaaggcacaaaatagtttgagtgcgcttttctcaaaccggttgttcaagcatatagacgtcgaaagttgtcaagagtttagagtggtcgaaataaagcttgacgaaa

SEQ ID NO: 1806 - DNA, 474 bp, Cyanidium caldarium
  unsure at all n locations
  Clone ID: LIB190-035-Q1-E1-F11
ggtcggagttcagggtggcccacgcgtccgcccacgcgtccgggaaaaggtggtaaaggtcttggaaaacgaggagccaaacgtcatcgtaaagtacttcgagataatattcaaggtattacgaaacctgctattcgacgtttggcaagacgtggtggtgtaaagcgtatatctggccttatctatgaggagacaaggaacgtgttgagagtgtttctggaaagtgttattcgtgacgcagtaacttacacggagcacgctcgtagaaagactgtcactgcaatggacgtggtttatgctttgaaacgccagggtcgtacgttgtacggttttggtggttaagaggcaaacaaagacatggtgtttttcaacaccaccagttgtgaaagaaacttgggtttcagtctcagtagacccttccttgtttatganattacagctttgcaaatataaaanactttcattttacgttgt

SEQ ID NO: 1807 - DNA, 321 bp, Cyanidium caldarium
  Clone ID: LIB190-035-Q1-E1-F12
tccgcccacgcaaccgcccacgcgtccgcccacgcgtcggccaacgcgttccaaaaaaggaaagctttaaagcatgaaaaaaaagaaatccaaaaaaaaaaagaaaaaggtaaaaaaaaggaccgaatcagggtaaaaggtagaggagcaagaagagaagaaagaatgctgggtggagtaccgaaacaagagaacggaagttaaacgtaagaaagaagaaacgtttacgagagaacgaagtagaaagaagagagtgtaaggccgcgtcataatagaaatccgaaaagagtagaagaaaagagagagaagaaagaacagaag

SEQ ID NO: 1808 - DNA, 387 bp, Cyanidium caldarium
  Clone ID: LIB190-035-Q1-E1-F2
aggacgcgtgggttttgcaagtttgcactttgaaagacgcgcttggactattgtatcgttgattctgtttttgtttcgttatccatttatgacatgtcaagttatttttgccattcattgggaagcttacaagttgtggaaaagaaaatttcctttttatccacatccgaataatagccaaaacatgtggtctcgaactatcgattatgtgagttcttggttcgcgtaacaagtcgtcaagtaaacatggcaactcttcttttatcatcttcttggccatgtccaggtctcctcagaacgatttgataatctgccaacgttcgagtcgcaaaacctgcttcacaataacaaaaataataaagccatttgcgaataaatatccagtcg

SEQ ID NO: 1809 - DNA, 279 bp, Cyanidium caldarium
  Clone ID: LIB190-035-Q1-E1-F3
ggtcgaccacgcgtccagaaattgttggtgaaatatgacaggaagaggaaaaggtggtaaaggtcttggaaaaggaggagccaaacgtcatcgtaaagtacttcgagataatattcacggtattacgaaacctgctattcgacgtttggcaagacctgggggtgtacaccgtatatctggccttatctctgaggagacacggaacctgtctagagtgtttctggaaaatgttactcgtgacgcagtatccttcccggagcacgctcgctgaaagaccgt

SEQ ID NO: 1810 - DNA, 305 bp, Cyanidium caldarium
  Clone ID: LIB190-035-Q1-E1-F4
acccacgcgtccgaaaagaaaaagaaatgagtggagtagtacaaggagcgaagatgatgggagcaggaatggcaacgataggtttagcaggagtaggagcaggagtgggaatagtatttggaagtttggtgaatgcatatgcaaggaacccagtattgaagcagcagttatttggatacacgatattagggtttgcgttaacagaggcagtatgactgtttgcactgatgatgagttttttgatactgttttcatagtataggagatacacgacgtagacgagaaatatctcagagagtgctggg

SEQ ID NO: 1811 - DNA, 409 bp, Cyanidium caldarium
  Clone ID: LIB190-035-Q1-E1-F5
agttggttgggtcgttggtgggacagtcatgtagtagaaatggctttagacaatgtcaaaaatgagcagatggaaagaatccgcaagacaattatttcaagggtaccagacgttcctaccgtggttgaaattggagcaggctcaggtctcaatttcctgcactacccttcttatgtgaaggatttgacagttattactttacaagaagaactcagcaaaagagctcgacaaaaggcacaacagagaggtctgaatgtgcatcatattcagggagatggccgagtacttcctttgaaagataactcggttgatgtggtcgtagcaacccttctattgtgcacagtaagcgatgtcgcggggtttcttcaagaagtttctcgtgtgttgaaacaagacggcaagtttttcc

SEQ ID NO: 1812 - DNA, 375 bp, Cyanidium caldarium
  Clone ID: LIB190-035-Q1-E1-F6
gccgacccacgcatccacccacgcgtccgcccacgcgtccggtcgttctttggtggggacttgtgcgtacggtgtgtgtgtgtgtgtgtgtgtgtgtaacaactatcagcaccacaaaaagatggttcgtatgagtgtattagccgatgctttgaaatccatcgccaatgcagaaagaagaggaaagcgtcaagttctcatccgcccgagctccaaagtcatcatacgcttcttgcaggttatgcaaaaacacggatatattggagagtttgaatatgtggacgatcatcgctcgggcaaactcgtcgttcacttgataggcagattgaacaagtgcggtgtgatatcaccacgatatgacatgaaagtgcacga

SEQ ID NO: 1813 - DNA, 395 bp, Cyanidium caldarium
  Clone ID: LIB190-035-Q1-E1-F7
aggacgatatatgtagaattttccaacaagcaataactcaaaaacaacatcagctcgatacctctcgtgcggacttgttaaagaggaaacaacatatccaacaaatgcaagagcaaaaagaacaggagatcaatacacagcgtgcaaaaactcttgaaacgttacaaaggcagcgagattcactcgaaaacaatttgaaacttgttgagaccgaagtgaacagcatgcaatccgaactgagtaatatcacagcgtctttaaacgaagcaccacaaaatgacgatgactttgaataccttaccaattttcgaaatagccttgtggaacaggtcgatgcgaaacaacgagagttgcaagaatggaaagaacaaagcaggcttcgtcagatgcaactc

SEQ ID NO: 1814 - DNA, 435 bp, Cyanidium caldarium
  Clone ID: LIB190-035-Q1-E1-G10
gtccgccaacgcgaccgcccacgcgtccggcaggacaaacggacaaggaccaccacgttggcaacgttgtttcaccaaacaacgtcgcagaaataagagaagaatttcttcgtaaagcaaagagagttcatccagacggacaaagacataatgaacgtgccaatgaggagttttgtcatttgaaagaggagtatgaacgtctcgtggaggcaacccaaagcaaccacacaacgagtagaaacatacttgtggaacacattcccttggaaaagtggaagagaacaacgacattgcaagatatggacaataacaactacgcggagaatcatcattgccaacaagtatacgttgagacctactgtcgatgtggtggactagtcactatagaagcagatgatgacgaggatattaggagactattgaataataatgaga

SEQ ID NO: 1815 - DNA, 448 bp, Cyanidium caldarium
  unsure at all n locations
  Clone ID: LIB190-035-Q1-E1-G11
gtcgcccgacgcgtccgcacattggaaaagatagacttgtctcaaggcagctttaaagtactccaagactgtgacaaagatttagaatgtgatcataataccaagtttcagttggnacttattcagtatggtctcttttcacctggtttttggacgagagaaaatgttctgctcttctatttggagctcgtgtcaggtgtattcataagggacactctctaccttttctacaacaaaggtgaagaacatttgtttgcgagtttaatgctgttgttggagacacaagtctcactgtatgcagacataaaaacaaactgggagaaacgacactttatcgttggcctcatcgtcaggtctttgtgtgaggaatatcaacgacagtattcagagctatgttcaccgaatgaaagcacgaaagatatgctactagtaaacagattgtttcaaa

SEQ ID NO: 1816 - DNA, 383 bp, Cyanidium caldarium
  Clone ID: LIB190-035-Q1-E1-G12
agatagacttgtctcaaggcagctttaaagtactccaagactgtgacaaggatttagaatgtgatcataataccaagtttcagttgggacttaatcagtatggtctcttttcacctggtttttggacgagagaaaatgttctgcgcttctaattggagctcgtgtcaggtgtattcataaaggacactctctaccttttctacaacaaaggtgaagaacatttgtttgcgagtttaatgctgttgttggagacacaagtctcactgtatgcagacataataacaaactgggagaaacgagactttatcgttgggctcatcgtcaggtctttgtgtgaggaatatcaacgacagtagtcagagctatgttcaccgaggtgaaag

SEQ ID NO: 1817 - DNA, 382 bp, Cyanidium caldarium
  Clone ID: LIB190-035-Q1-E1-G2
agcgaaatgagcgattgtcagatgcattgcctaacgtttactggttgcctttccaactcatacttgtcaaagagctttggcacaagatgtgaaaaaaataacaggtacaaaagaaattttaaagtcggaaagcaattatcttgtcggataaaggcttcccttggagaagagtttgataaagttgctctccctaccccatttggaatagtatttcgtgacttgaaccagttacctgaaaatatactggatatagcaagtgccgctgataaaagtgagaccagacgagacttttttacagaagagaagtttgaggagttgactggcataattcgtacaaaaggcggtggcacagttgttgttcctaacgtctccaacacaccgt

SEQ ID NO: 1818 - DNA, 356 bp, Cyanidium caldarium
  Clone ID: LIB190-035-Q1-E1-G3
aggaaatttgtagtgaaaccgatcattggctccgaatggaatccgatgcggttcaatcgcagttgttatcttttgacgttcctttgactttttctgctgcctgttttctgttgtgttttctgttttgtgcatttacaggaatgaatacgggaattcctatttatcattcatcgcatgcgatcgactattggttgggaatgatacttatagttgtggtatatcttagcagttatgcgtggataatgacatgaaagcttggtcgaagtggtccgaaactatctcctggacaagttccctttgatcttgccaaacgtgcttcgcatcatacatcaacacaggatagtgacaatagtgtt

SEQ ID NO: 1819 - DNA, 414 bp, Cyanidium caldarium
  Clone ID: LIB190-035-Q1-E1-G4
cccacgcgtccgcaagcaccaaagaaaccgcacgtttgctgattggacgttgctttctttgtaggaaatttgcgatgtccgacgatcagacgacaagactcggctctttgtggttgtctcgacaactatgtatctctctatggatgttgtggtgtggaatgaggtactcgtataggttggaacgtttggtcatccattgactagtgaataatactcgattccgtatattttatctctttattttctacttgtacataaaactagttatatgtctggtagctataaaagccctttgccatctcaacatttatataaaaaaaaaaaaaaaaaaaaaaaaaaaaaaaaaaaaaaaaaaaaaaaaaaaaaaaaaaaaaaaaaaaaaaaaaaaaaaaaaaaaagggggggccccccaaa

SEQ ID NO: 1820 - DNA, 414 bp, Cyanidium caldarium
  Clone ID: LIB190-035-Q1-E1-G5
gttgaagaaaaaagagttgtctgaggaccaaacagagtgacaagaagagatggcaaggagaatattgggtgcttatatgggagatgccacagtggcaactctgttcagtatcaaaatgttgttctatcttactatcatgggtttctccataactatcttggctctcatgggaaagaactcggatggtatttggatacatagtgtgccacctgcagaacaatattgtgcatacaagtcttcattggaggtgaaccaccatggaattgcttcctattgcaagtatatcgttgccgtagctgctattgggttggttatctcgtttttccagttttgctacggtctgttgggtatctttttcaagtggcaacaaaagttgtggtatattgaagatgccttcaatccaattttccgggc

SEQ ID NO: 1821 - DNA, 425 bp, Cyanidium caldarium
  Clone ID: LIB190-035-Q1-E1-G9
cgtccgggattttaggaatgaatgaatgtttccatcgtcgccgtcgttgtttttgtttccagaccgacttggaaacgacatcgatcatatatagtgtgttacaatggggcttcaatgataggtctgacgctacaaagtgaaagtctgcttgtgtttcccctgggcgaccggaaatgaacccaaattacaaggttagtatattgaaagaatggccgtcagtactttacctgtgatgagaacatttttgcctgctttcacagtttatatgactgtcagagtgatttgtttaatttgcgtctgagaatatattttactattggaaaacaactttttccctagtacatatctcaattgtgtttttgtagggtttgctattcaggacttgtaaattctttacttcggtcaccagctatctatttaacaag

SEQ ID NO: 1822 - DNA, 313 bp, Cyanidium caldarium
  unsure at all n locations
  Clone ID: LIB190-035-Q1-E1-H1
acgcgtgttgacttctgtggagaaggatcaaactttgtccaaaggagcggagatgcatcaagaagagtctgcataaaggactatttttgtatagttgccatcatggacggtttgtgtggaaagttgtgattgtgtagagagtgtgtttgtgagttgtgtgtggtattgttgttttacgtctttgtgagtgaccactcgtangagtgtgatgaatcctcacaaagatgatagaagacaataaaacgatgttgttttggtataaaaaaaaaaaaaaaaaaaaaaaaaaaaaaaaaaaaaaaaaaaaatttttttt

SEQ ID NO: 1823 - DNA, 399 bp, Cyanidium caldarium
  Clone ID: LIB190-035-Q1-E1-H11
cgtaccaaagcgaatgataagattcgttttctgttttcacatgtcgacgtggaagcttacggagagagcgttttacacagtacacatgtacgtgatttgaagagcgatcgagtgaaatatatgccatgttctggctgaatctttgcggttggtcatttaccagctaccaagtttctagacaatcagttggcgttggatgatgatggatatattagaacggttccatgaagcacgacaaccaacgttgctggtgtttttgcttgtggcgatgttcaagataacaaatggagacaagctgttacggctgcatgtactggatgtatggctgcattggcagctgaacattacttgcaaacactggacaacggacatctcgatgcatgaatatctcctctttgt

SEQ ID NO: 1824 - DNA, 291 bp, Cyanidium caldarium
  unsure at all n locations
  Clone ID: LIB190-035-Q1-E1-H12
cgtgttgcgaagcgttgtcgttatcgtctatggcggtatttgaaagtgatatagttggtcctgcaattcactttacgaaaaagtataattcaaggangcgctacaaggagtgcatttcgtgctttaatgcttcgggtggtaaaccagggtggttcttttgacataagccgaaaattactcgcaacgggctatacgactgataagggtatgaagaccaataatggtgctgttcgagaaagtgacttttacgagagagtcttttcaagaatagcttcaaaacgctctgacttt

SEQ ID NO: 1825 - DNA, 262 bp, Cyanidium caldarium
  Clone ID: LIB190-035-Q1-E1-H2
aaaaaaagataaaaaaaaaaaaaaaaaaaaaaaaaaaaaaaaaaaaaaaaaaaataaaggaaaaaatataaaagattaaaaaattaaaggttgggtaaaaagttttaaatgtttatagagtgtatatgtaaatgtatatggtattgatggtttatctttttgattgtgaagacgcggttgaatatgatgattcccgagttaaatgatatgctacattaaaaagatgttgtattggtaaaaaaggttacatttttttttttta

SEQ ID NO: 1826 - DNA, 352 bp, Cyanidium caldarium
  unsure at all n locations
  Clone ID: LIB190-035-Q1-E1-H3
agggtggttcgtggatgacctttctactcatacttgcctttgttgcgggttattttttgggcgaacgaggcanaaagaagaaaagtccgaaatatagttgggtaccgcctaccttaaaccacctatcagagtttccagcgaattcgaacaacagtcgtggtacagttagaacttgtaaagaagagtgtaaattggtactttgtgttcgttccgtaagctgctctttttaccaaataaatacgacaagtatcaacctgtttattaagatttgaagatgggaaagggtaaaatagctgcacagtgtggacacgcaacactcggtgcctatcaagatacacttcggaccaaccct

SEQ ID NO: 1827 - DNA, 193 bp, Cyanidium caldarium
  Clone ID: LIB190-035-Q1-E1-H4
acctttctgctcatacttgcctttgttgcgggctattttttgggcgaacgatgcataaaggagaaaagtctgatatatagttgggtaccgcctaggtgtggcacctatcatacgttccagcacagtcagagacaagttagcagagttgtgtaggttctgaagtgggagtggagagagtggcattgagtccaat

SEQ ID NO: 1828 - DNA, 405 bp, Cyanidium caldarium
  Clone ID: LIB190-035-Q1-E1-H5
aggagaattttgtggtccacgatatacaaactgacactggtaaacttgatagaaacgcagttaaaggccatcaagtctcagtacgtcgtgaatgtcatggaaagcggacctggctttgttgtggaggtgttgtttgcctctagtagacttggatgcaaattttctgttggttgcaagtgcgaaaacctttggcatatttctccaatagagtgggagttgaagagtatttttggtcaatgtgaacgagtgtttgcattgaaggaacagttggatacgtttgtaagcgagacttgtccgcttttagatggcatgaaagcagtgcgtcaatttttagcgaaaatggaacccgttcagactatttaacatcaacgttgcaagtgtcctatttttggatgccttgtggat

SEQ ID NO: 1829 - DNA, 402 bp, Cyanidium caldarium
  Clone ID: LIB190-035-Q1-E1-H6
atcgaatttagctgttggataaaattcggaacaaattatcctcgattagattacgcctacgtagatatgactgacgacggtagttggatgttgtacctcattcaagtttctgtttcatcttttccagctcataacacagactcagcacagttggaacggttgtttaagaaaactggtggaactgttcaacttgcttcgttactaaattcgttctttgctgaggtttttgaagtctcgcctgtgtacgatgtcagggagaagatagtgaactttgaggtgacagactctcatggcatgtcttttcgagaccgaatatctattttgtatgtgactccattgacaagagaggacgcgaaagcagacagcgctcctgaatttgtagagtttcctgcttttgacaac

SEQ ID NO: 1830 - DNA, 381 bp, Cyanidium caldarium
  Clone ID: LIB190-035-Q1-E1-H8
cccacgcgtccgcggacgcgtgggttcaaagagtgacgtggaaagtagtgtgaaaagtgaaccaacgagcagcaaagtgcaacaaccagaaaagcagtcaactccgccctcgtcacctcccaagccacctcagcaagttgttgagacaagtaagcagagttttgtaggttctgaagtgggagtaaagagagtggcaatgacacgaatgaggcgtcgtattgcggaacgactaaaagaagcgcagaatactgccgctatgcttacgacatttaatgaagtagatatgtctgctttgatggagttgagaaatagttataaggaagcctttgaaaagaagcatggcattcgtttaggctttatgtccgcatttaccaaagcagc

SEQ ID NO: 1831 - DNA, 419 bp, Cyanidium caldarium
  Clone ID: LIB190-036-Q1-E1-A1
agcaagtttccatcagacatgttcaagaaaatgagcacgttggtgttacttgttagctttctatgcggtatattagccattgtgcatggtgcgccaccagtgatggcatcaccaccaggcttccaacaggaaccaactgttcatgttcctgaaaactatggtagcaactatgactcaggaaatggacattccatcaattatatgttacagccacatattccattcattcctattggtagtccttctatcgccaactctccttcctatgcatcggatcaatatgctcaagctttgtctgctgccaacgccatttcattcctctgcggtaatgcaacggcacaaatcaacgcaactgttcaatgtcagcttgcgttctctaattccactgcaactgcttctggtcttggattggtagaaac

SEQ ID NO: 1832 - DNA, 385 bp, Cyanidium caldarium
  Clone ID: LIB190-036-Q1-E1-A4
cttggaaccaaactaaagaagggcaacagaaaccaccggagctagaaggccggaaccaacggtaccgccccaattaacctggaaaatgtggtgcaaccttaaaaaacttgcgtccccaaccacaattgtgggcctaatgggtaaaatttccaacggtatttgggttcacactgttcaagcaaaagacgaatattgtgcatacaagtcttcccttcaagtaaaccaccacggcatagcttcctattgcaagtatatcatggctgtagcagctattggtttggttatcagcttcttcgagttttggtatgcattcctcggaattttcttcaagtggcaacaaaagttgtggtatattgaatctgctatcaacgtgtttttctgggct

SEQ ID NO: 1833 - DNA, 376 bp, Cyanidium caldarium
  Clone ID: LIB190-036-Q1-E1-A6
agttaccaatggtgtttcgaatgtcttttgtgcaacttggagtacggtttctattacattcaggaaccaactcctactccctattatcccagctattccagttcttatccgatgtacagcagtagctattccagctacagcagttacccatcttagacaaccagttcttatagctcataataagaaaggatgctgaatggttggtcaggcgaaggatgccttagaatattttcgttttgtttgttcggtgaattctaaatgaataaaggcaatatagttgtcaggaaaatgtagacgttaaaaaagaaactggagttatccctgacattaaagtatacaatggaattactccgattcctggtaggaaaggatgaaa

SEQ ID NO: 1834 - DNA, 410 bp, Cyanidium caldarium
  unsure at all n locations
  Clone ID: LIB190-036-Q1-E1-A7
cccacgcgtccgcccacgcgtccgagaaattgattgcattttgttcgaagagtgatggcgattcttctttgatagtatctcttgttcaacatataggaggaaactttgaaaagatgggttgggaagaatctcaaatagaagaattgctttccacgctttatgaaaagaagcctttattggcatccgtactaggcatcgttagtggttttccatctctgtgcaatcgttatctttcacagttggaaagaatagcttctccagagcctgttgacctagctatcctacctttgatgaagacttgggtgttggaaggangagaagatgaaatttccaagagattgatagctattggtcgtacttggctatttgccgcactttgtgcgcgtttgttggagaagaatagaattatg

SEQ ID NO: 1835 - DNA, 339 bp, Cyanidium caldarium
  unsure at all n locations
  Clone ID: LIB190-036-Q1-E1-A8
gaaatgttcaagttgatgccagccaagcaccacagttactattataccttgtttctattgggatgcataggcacgttgctattatctgctgcaaatggacaatccgtaaaaacagaacagagtgggactcaacaagcaaagaatcaaaccgctgttcctcctcggtcccagtggaaaagagctccttggacgatagtagacagcttctacgctggaattgcactgttttatttgatattctttgctattggtacttggagaaatgtaacattgtccaagcggataggtcaactgttgagttcctgtgcgtcntctcagtttgcttggattggtacagac

SEQ ID NO: 1836 - DNA, 450 bp, Cyanidium caldarium
  Clone ID: LIB190-036-Q1-E1-B11
cacgcgaccggtattactgatgccttgtttttagttttaccaggcttatcctttgttattactggtaatcgtatattctgtagacgctcggacttgaatgaaacggaagcattggagtcctgcttttcgtttatgaagatatgccccacgtacaagtcgttggagattcttttggaaggcgagcaaatttatgtagaagaactcgtgcctattgtatttcgtttcgttgaagactttcttcattttctttttgacaattggaaaaccgtaagttacggctctccctcgaagaaggacctacagtctggtttgtggagagagcaagcgcagaactggattcgttcttttcgtcagctgtacacagaagtggagttatttatgaagatggtaaatacgatatccacttgtgatcgatcgctcgtaaacattttaccatcgccagttgttttc

SEQ ID NO: 1837 - DNA, 229 bp, Cyanidium caldarium
  Clone ID: LIB190-036-Q1-E1-B2
catgcaactaggtagagcaaccgggtgattaatgaggtgtgataaattggaggatcatgatggcacggaagaatgttataagtggtgagagtagaagccataacggatgtaataccgggaatctgataggaggacagcttcattggagctgataaaaggtcgtgtcaggagaagtccgcattggtgacgattggtccacgtccagggaagtacgacccagcaatgagga

SEQ ID NO: 1838 - DNA, 375 bp, Cyanidium caldarium
  Clone ID: LIB190-036-Q1-E1-B3
aagttgagccttgtggtggtgatccccggaattaaccaacttattggaaatccgccggccttaaaaaacataactgcaattattgaaaagcctgacataaaatggataactaggacaaatctcattacttgtctgaattctgcagaaggaaatgttacggttgacttgtcccggcagtgtaccttgaaggatatattttcattgaagcttctcgacaataactttaagttggcgtgttttaatgatgccttgtttttagttttaccaggcttatcctttgttattactggtaatcgtatattctgtagacgctcggacttgaatgaaacggaagcattggagtcctgcttttcgtttatgaagatatgccccacg

SEQ ID NO: 1839 - DNA, 353 bp, Cyanidium caldarium
  Clone ID: LIB190-036-Q1-E1-B4
ccggattaccaaaccagaaaatgggaattaaaaggtaaaaaccaggaacggttaacaaaaaaaggaatttaaagaaaaaaattgtaaggcggcttcatactaaaaatccgaacggattataacaaaattcagaaaaaaggaaaattaagataaaacccgtactgaaaaccgacccaggtacccaaggataaaggaaacccaaattaaggtgaaataatggacaataaggaactaggcaaaaggatatggtatctgcggtagaacatatgaatgaagcagcaccgactgttaagcacaacacagcactctgcataaaagagaaaatgtacagtatagactgtgcggcctgccaa

SEQ ID NO: 1840 - DNA, 431 bp, Cyanidium caldarium
  Clone ID: LIB190-036-Q1-E1-B5
gagaaagaagaaaaaatgagcgatgcatccgtcgagcaagtacaacagagactgcacgagttgttagaaaacctggatacgttggaaagacaagtttcccaactagagtacgacagttgccgcaaggaaaccaaccaagacgtgcagcaactcttaccacaatgcaaatacttggaagagtatttgttacaactagctctacaggtggacgggttacaagtaagagcctagttgccttggtatatactcgtgtgatacatttggtcctagatttctagagaaagtgcgcaaaaggcttttcgtgagaagagacaagaagaggcaaaggaaattaccaaactattgtctcaacgaaagaaaaccaaccaacgagtgcaactattgctgaaacgattggatactgtagtagccaacttgtcataactctgaaa

SEQ ID NO: 1841 - DNA, 405 bp, Cyanidium caldarium
  Clone ID: LIB190-036-Q1-E1-B6
gacccacgcatccaggcacacatcggaccacacttcatgcaacagcgtcagcggatacatcagatacagaagcagattctacagcatttggaaaaggatgaactcgctcaactttgtctcgtcttcgtttcttacctgtcagaatacccagatgaagacatcacgtacacaagtattgatgccatacagacatgtagtgagtagctctaagtctctgagactttcgttccaaatttaggatatagacacgtggagtcgtcgcaagtttcttctcacttcacttggattcgtgtcatctgcgctgttccgttattctcaagattcttgggcttccagagactatgcatgtgttggatatttgcaccgaggtgacaaggttgacatagacaacgctattatcagagc

SEQ ID NO: 1842 - DNA, 443 bp, Cyanidium caldarium
  Clone ID: LIB190-036-Q1-E1-C10
ccacgcgtacggaagaagacttggaacaagttgtccctctcattgcccgcgtcactactgctactttataaagcataggaaaaattatattgcaagattgttcatgtccaataataagagaatgccaaaaagaacagatactttggctttatttgatgtagatggaactctaacaccgtctcgatgtcaagcatctcgcgaaatgttggagtttttaagaaagttgcgaaacgaggtatacactgctatagtgggtggctccgacttggcaaaacaagaagaacagctgggtcccactattttagaggatttcgattatgtgttttccgaaaatggtctcgtggcatatgaaaatggaaaattgatccacacgcaaaacttggcaaaacacttgggagaggagaaactgaaaaacgtgatcaatagttgtttacattatattg

SEQ ID NO: 1843 - DNA, 416 bp, Cyanidium caldarium
  Clone ID: LIB190-036-Q1-E1-C3
acgcgtccaggtagcaactgcgcgctcgttatcatacaactacaactgtccatagagtaccagcagacgaagaaaaggaatctgtcggtataaagcctaaacgtttgcatcagcctcttggagtttatccacaaggaaccaatctggaagaattgagagaaaattggcaaattgaccctatggaacttatctcgaaagtacctccgatagtagtcaatggctatgtcataccgtgtaatggaggccgcggtccattaggacatccaatagaatatattcgtttggaagcaccttatccttcaacttgcaaatattgtggtttgcgatatatcaacaaagacacttttgaaaagtggaaaaaagaaaataacgaataataaaatggaaagattttaaaaaaaaaaaagctaccgatc

SEQ ID NO: 1844 - DNA, 428 bp, Cyanidium caldarium
  Clone ID: LIB190-036-Q1-E1-C6
acccacgcgtccggttggaggctccgattatcgtcgacgccaaaggtcatcttttaggtcgccttgcttctatagtagccaaggaaatattaagtggtcaaaagatcgtcgtcgtgcgttgcgaagaactgaatatttctggagaacatcatcgacacaagctcaagttcaagtcttatttgagaaagaggatgaacacgaatccttcccgcggcccttatcatcatcgctctccttcccaaatattcttcaaagcagtgagaggaatggtgcctagaagaacagcacgtggtaccgctgcgttgagtcgattaaaggtgttcgaaggtgtacctccgccgtatgacaagatgaagcgaatggtagttcctcaagctttacgtgtggtgcgattgccaccagataggaaatacactcaattgggcact

SEQ ID NO: 1845 - DNA, 119 bp, Cyanidium caldarium
  Clone ID: LIB190-036-Q1-E1-C7
acccacgcatccagtcaagcgtcaggttatatggcaacatcaaagtttatggttcaaggtagcaggtatgagtggatgatttgatattagtttgggagatattaagtggtatgagatat

SEQ ID NO: 1846 - DNA, 82 bp, Cyanidium caldarium
  Clone ID: LIB190-036-Q1-E1-C8
gatttggtaacattcaagtttatggttcacggttgcatgttttagtgtaatattctctgttagttttggatcgtttgttttg

SEQ ID NO: 1847 - DNA, 99 bp, Cyanidium caldarium
  Clone ID: LIB190-036-Q1-E1-C9
atgctctttcttcattgcttttcttattcaggttttggtatctcgtcttcttgtcttgtctgttctccttttctggcttatgtctttttggctcccatt

SEQ ID NO: 1848 - DNA, 259 bp, Cyanidium caldarium
  Clone ID: LIB190-036-Q1-E1-D1
acgtcagactcaattatatgaaattcttagacatccaattcctaaaccaactccaaaggaaacttaattacctccaaattacggaataaccttttcgttgttcatttgaaacctaatcctgttaaaccccaagtttttaccaaaaatttagccaatcctttgaacaaaagttttttgaaccaccttaaacctctcccaagggcatccaagcgtctcccgttggccccttataagaccaaaattccccccagaaaattat

SEQ ID NO: 1849 - DNA, 466 bp, Cyanidium caldarium
  Clone ID: LIB190-036-Q1-E1-D10
cacgcgtccggtagtttttgggtgacgttgtattgttatccatgaagcaaccccgtcgagttttctttcaacatagttatgttttaggtggaactcgtgccttttagtggatatttgtgtcaaagggaggtttagcttcagatataaaaaatgttgcagccaatagtttctgtataccacaaagacgagagggagtcgcatatcctggaagagcaaaccaaaaaggattatcagaaggtcttatgcagtggaaacaaggggctgcaggacctttttttactcttccagtactcacatgtggaagacgcgcagaatacttcggccgtttctgttttggactcaaagtcaggtttcggttcttgtacatcctgcagaaaaaagtctctctgccgtctcctcactgcaaccagtagcaatatgacttctgctcgtctaagtagtgatattgaagagtcatacaaccaaa

SEQ ID NO: 1850 - DNA, 478 bp, Cyanidium caldarium
  Clone ID: LIB190-036-Q1-E1-D12
gggtgcccccacgcgtccggaagtatctcctgatttctatgcctgggtatttcctaaatatgatcacgtgggagtaggaacaggaacagttatcgatcgtccttccattaagaaatatcaggcagcaatacgtacaagagcagcatcgaaactcagtggtggtcatattattaaagtagaggcacatccgattcctgaacatcctcgaccaagaagagtagttggaagagttgctctcgtcggtgatgctgcaggatatgttacaaaatgttccggtgaaggtatttactttgcagcgaaatcgggacgtatgtgtgcagaagctattgcggagatttctttacaaggagaaagaattccttccgaatccgaactgaaggcgacttatctgaagagatgggatagcaagtattggtcgacttacaaagtattggatgtattacaagcagtatttatcgcaataatattgctcgggaag

SEQ ID NO: 1851 - DNA, 435 bp, Cyanidium caldarium
  Clone ID: LIB190-036-Q1-E1-D2
accacgcgtccgcgatgattcgatgcggcacaagacagttgtggtggcaactgcgcgctcgttatcatacaactactactgtccatagagtagcaggagaagaagaaaaggaatcggtcggtataaagcccaaacgtttgcatcagcctcttggagtttatccacaaggaaccaatctggaagaagtgagagaaaagtggcaaagtgacgctatggaacttatctcgaaagtacctccgatagtagtcgatggctatgtcatagcgtgtaatggaggcggtggtccattaggacatccaatagaatatattcgtttggaagcaccttatccttcaacttgcaaatattgtggtttgcgatatatcaacaaagacacttttgaaaagtggaaaaaggaaaataacgaataataaaatggaaagatttttaaaataa

SEQ ID NO: 1852 - DNA, 350 bp, Cyanidium caldarium
  Clone ID: LIB190-036-Q1-E1-D3
acgcgtcgagcgagtgtgaacgatgcttgagcggcagaaaattcatttgttgtcaccactgtaccccccttatctttcagttggttcagtccatgttttcggaagcgaccaagaaaagggttccgtctgttccgaacccatttatttgcctcaagctcatcaaattttttccgcaagtactattcccgaaaccctaggaaaattccttgcgcgttgactccattggaattttcacgattttagctccgatagtcgtcgattgatacgtcatagcgtgtaatggacgcagtggtccattatgtgcatccatactatttattcttttgcgtgcaacttctccttcaactttc

SEQ ID NO: 1853 - DNA, 206 bp, Cyanidium caldarium
  unsure at all n locations
  Clone ID: LIB190-036-Q1-E1-D4
gtttagtgtaacactgcctaccattgttgtccagaaccaaagcctgaaaatggaagccattcaagaattgtttcaatatccattgtatactattgctaagaagaatctaatggaaaccaaagcgtatttgagcaagttttctttgtttcgtccatgtnttggaggtaatgactgtgagcattagaaagaagaagacagcaagaaac

SEQ ID NO: 1854 - DNA, 300 bp, Cyanidium caldarium
  Clone ID: LIB190-036-Q1-E1-D5
gttgctgctgcttttgttaatgagcttccgagagaacttatcttgagaattccatttatcttggctcaggtgttcactatgccatcaaaaagttagagtgttggccaataaaatcgtacaaccattttattctgggaaaccacagcttttggtttctgggggtactatgctcgctggtcaggaacttaactgaattcacggaagggatgacatctacttattccaatcatcgatatggcttactgattccaaaacgtccactctatcatgggtggaatccaacttacaaaacctcttttt

SEQ ID NO: 1855 - DNA, 416 bp, Cyanidium caldarium
  unsure at all n locations
  Clone ID: LIB190-036-Q1-E1-D6
attcgcccgatcgacccacgcgaactacccacgcngttctcgagcgcatcgtgctcactccagttatggtcnggtatccnatttggatgttcgnagctgctnggctttttgatgcaanaaggaattggaagtatttcgnaaaaggcattgtaagaacccaaatgagaccttaatttagctatcttgggaaggagccaatagtatccgaataaaatacaacgtcatccagacatttattatcaaagagtggatgaaatgattatcggaggtggcatgtgttatacttttcttcgagtattatattccatgccgattggagactccatttatgacgagcctggatcacatttggtctaaaataataagacagaagccaaagaaagaaacgtatagatacacttttccagtcgattttg

SEQ ID NO: 1856 - DNA, 158 bp, Cyanidium caldarium
  Clone ID: LIB190-036-Q1-E1-D7
gtccgatatctatttattaacgccaatatttacggtatctattacgattatatatcgtcttattcttatttatataaaataccatctatatatatactatgttgattattcttctcctagatcatttttttccgggtaactaaatcttttgttttctc

SEQ ID NO: 1857 - DNA, 384 bp, Cyanidium caldarium
  Clone ID: LIB190-036-Q1-E1-D8
agaggacatggaaggaaggcgcagtatcctaagcaagtgtggcacccctttggaggcaagtttcctcatccgagggattggaagaagcacacgaatatagctacccttattatggcactcactgtgatccctattatttactatgccgagaagcatactgtctattaccagtatccttatcataagattccttggaggcccaatttgaaaacttttgatgaagatttggaggaacgaagaaaggccaagatggagaggaaaagtgttgcaagcgatggtgatgaacagctcgattcgtagaacttgggaaaaaaggcattccttgtttgttgaagtgttttcgataaatgcacttgtcaactagttcaagtaaatcctagtttt

SEQ ID NO: 1858 - DNA, 456 bp, Cyanidium caldarium
  Clone ID: LIB190-036-Q1-E1-D9
ccacgcgtccgccaacgcgtccgcaaagagagggaattcccggattccaacccgtatatctgtatgatgaaggttccacaattgactggattccttgcggacgtaaacttacgtgcagtcatccgggtatcaagttccactatggacccgacaattggtacaaccacgatgtatcgatactagaagttgatggaaactttgacaagttggaggaacttatttacatcgagtcgcatcttaataatacttccacgaaattttatggggaaataactcaacaactcttgaggaacgcttctgctccaggatctaataacggaactggactcttccaagttctcatagccttaaagataagacaactttatgaagaacttacaggaaagaatatagctcctgttctcgtttagttacaacggtattctcttccaattatgtagtaaacttcgtagtcgt

SEQ ID NO: 1859 - DNA, 392 bp, Cyanidium caldarium
  Clone ID: LIB190-036-Q1-E1-E1
cacgcgtccaatggaatgatggatgatattatagaagagaagagaaactaaaagaaggccctggaacaaggtactttgggggaaatagatggcggcgatgtatccaaagcatcgtttccgatattggataggaaaggtttccaagacgcgagtaaatggttgaaaattgacggacaaggacatgtagtattccataagaagcacaagttgatggccaaaaattgcgtagttcacggcaacggtgcgcaagaaaatgccaaaatacgctaaagcagctgggcaatcatttcaaagccatcgatgaggacaaggaatgagatatctttagctcgctatatgtagagaaagagagagagagatgcaagaaaacttggataaaaatacaatcatgt

SEQ ID NO: 1860 - DNA, 307 bp, Cyanidium caldarium
  Clone ID: LIB190-036-Q1-E1-E10
cacgcgtacgccaacgcgtccgcccacgcgtccgcccacgcgtcagagagctttgaaggtctcatggataatgtgtgaaagcgttgaaatcagtgctatgtttatgatggtcgatatgatggcaaggttgtggtgggttcgtggtgtgggaaacatagtatttccctgccagcaattggcagttactatcatcgagagcacctaactctgatctccgcccaagttagttttattctactacacctttctgggcgaggggataatgacggattgtttgaggttggttgcgatgttatgagggacattg

SEQ ID NO: 1861 - DNA, 357 bp, Cyanidium caldarium
  Clone ID: LIB190-036-Q1-E1-E3
atatataaagctaacgttcaaataaactgcctttaaatacttttaaaaggacacaacttaataattaagtttcaacctgatagaaatccagaacaacgggaagaaactgaaagaaactttaaaagagtcaaagaagcttatgatttattaaggcagcgaaaggagaaccagtttgaaaggacggaatatcgttctggaacttcttctcggtccagctaccgtcaggactctaggaaaactcaaactcgtaacgcctattatactggacagcattattcaggtttcagcaggactagcaatcggtctacgaagcctcctcgtatgttggatattcatggtttgcaaattctcgtcttt

SEQ ID NO: 1862 - DNA, 386 bp, Cyanidium caldarium
  Clone ID: LIB190-036-Q1-E1-E4
acgcgtccagtgaaagatgcaatctagccatgctccaaatggtatgctgatagaacgtcttctggagttgaacataataatgaagtttcatcgtggtttgcgatccaagagacaacgggaacgattcgttggagactctttaaggagagtcagctcgcgcttatgatatattattgcagcgttaggagaaccagtttgaaaggacggaatatcgttctggaacttcttctctgtccaactaccgtcaggactctatgaaaactcaaactcgtaacgcctattatactggacagcattattcaggtttcagcatgactagcaatcggtctacgaggcctcctcgtatgttggatattcatggtttgcaaattctcgtctttactcta

SEQ ID NO: 1863 - DNA, 404 bp, Cyanidium caldarium
  Clone ID: LIB190-036-Q1-E1-E6
acccacgcgtccgcggacgcgtgggcggacgcgtggggcaagcgtgaaccgtgagggtagttcatcatggttgagacaaaacttcaagatggtgttagtgcttcgctttggactgttcgtctcttcctctacacagttattttagcattctctgtcactatcattggcttggatggacgttaagcagacaacatatgggacgatagcttattctatgatgggaagtacattaacttttgtgcttattctgcctcttctgttgtaaaacgaggggaccatggagcgtgtaaatatgtcatggcgttggtgtctaatagtttgattctagtctttttcttggggctttatacatttgtagatgcgttgtatcctattcttaacaaggtttggtttactgaattggg

SEQ ID NO: 1864 - DNA, 352 bp, Cyanidium caldarium
  Clone ID: LIB190-036-Q1-E1-E7
cgacccacgcatccacccacgcgtccgcggacgcgtgggcggacgcgtggggcaagcgtgaatcactgggggtagttcatcagtggttgagacgaaaacttcatgatggtgttagtgcttctctgtgggctgttcgtctcttcatctagataattaatttagcattctctgtcactatcattggattggatggacgttcagcagacaacatatcggacgagagcttaatctatgattggaaatatattaacttttgtgcttattctgcctcttctgttgtagatggaggggactatggaacgtgtacatatgtcatggcgttggtgtctaatggtatgattctagtcctttt

SEQ ID NO: 1865 - DNA, 469 bp, Cyanidium caldarium
  Clone ID: LIB190-036-Q1-E1-E9
gggtgcccccacgcgtccgccaacgcgtccgcccacgcgtccgcccacgcgtccggagctttgaggtctctggtagtgttgaagcgttgaatcaagctattttatgtactcgatatgatggcaaagttgtggtgggttcgtggtttgggaaacagagtatttccctgccagcaattggaagttattatcatcgaagtcacctaactctgatctcctcccaagttagttttattccaccacatctttctgggcgatgggataagaagcgaaggtttgaggttgcttggcattttattaggaaattgcaaccatcacgtttaatcagtaaagttgttaaaatagacgaggctagtgaagtgtatcgacaaatggatgaaaaccccgatcattgtgttcagatattgttttcttatgagcatacaacataatgccatttgtgtttatttctcaatcatatctattctactcc

SEQ ID NO: 1866 - DNA, 446 bp, Cyanidium caldarium
  Clone ID: LIB190-036-Q1-E1-F10
ccacgcgtccgcagaagctaagcgccctcaggcttggttagtactgaggtgagggatcactcgggaaccccaagtgccgcagcgttgaaaatttttcaagtatttcgcgagtaataatatgtgttgaaatatttttctactaagaagttctttttgcttggcgctgtttgaaaataacggaatgattcttgtcctgaccagtcgatagggtcaagggatgactgtaagaggtatccaataacttgtattttccatcgtatgacaagaggcttgttggaaaaaagcagcggataacttttgcgccgattgcgtcgtgcttaagttgctcactttcctgctgaccaagaggtttcaaaacctgcagtgaaaggagaaatatattctcactgaggaacttggactgagcgactagggcaagatgcgtgttgtttgggttgcggttttgt

SEQ ID NO: 1867 - DNA, 266 bp, Cyanidium caldarium
  Clone ID: LIB190-036-Q1-E1-F11
cacgcgtacgctatgactcatcgcactcaggcgtggtaattactgaagtgtatggatcactcaggaaccacaagtgccggaacgttgtgtatttcacacgtatttcacgagtactgggagttgtggacggattttacaataagtatgttcggtatgcgtggcgctagtatgaagataagggtgtgatgcatgtcttgctaagtcaatgcggtcaagggatgactggtagaagtatccatgaagctataattcatatgatatgagac

SEQ ID NO: 1868 - DNA, 432 bp, Cyanidium caldarium
  unsure at all n locations
  Clone ID: LIB190-036-Q1-E1-F2
acgcgtccaggttacttcattgaattctgaaggctgccgtaacttacagcagtctttgtttaccatggagagcgagacagtgaaaaatgataagctagctaaactacaaagaatggctgtgaatgttcgaactggtgggaaaggtaccgttcgaaggaagaagaaggcagttcacaagggcacaccgacggatgataaacgactgcaaagcactttgaagcggcttggtttaaaccaaatacctggaatcgaggaggtcaatattttcaaagacaacgggcaggtgatcaactttactacccccaaagttcaagcagccatcggagcaaacacttatgtggtatcaggccaaggggaaacaaagtcncttcaggagctgcttccaaatgtactcaatcagttgggttcggacaatctagctcaaatgcgctc

SEQ ID NO: 1869 - DNA, 404 bp, Cyanidium caldarium
  Clone ID: LIB190-036-Q1-E1-F3
gaacggtccttccaacggcaattcaaaaattggtttcaatgaacgttcctccgccccaaaaggtaataaaccttacaaaggaattccctttggacgggaacccaatgaatttgcctttggttacaaaacttggcagtcgttcttctcggaaaacatcgaatatgacgaataatagtactggtggagactatggcggtcgccgcatcattattactgcaactggaaagagacgaggtggtcgatggagacgtaaaaactttcctgtgaataatgaacgcatgatggattaagaagaagacacacaagtagttgataacattttctttataaaacttttctttgttggaataaaaaaaaagttgcagagaaaaaaaaaaaaaaaaaaaaaagaaaaaaaagaaaaa

SEQ ID NO: 1870 - DNA, 426 bp, Cyanidium caldarium
  Clone ID: LIB190-036-Q1-E1-F5
actaatttatttggatgagaatcgagagccatgtaaaggtcgcacaaagtcggatactattgagaaagcattaggcatgaaaagaggccaagtttttcgttggagcgatgtttattgggagcgaatcacggagttgggactttttgattatgttcgtgcagagttggagcttcgtgatgattcttcagtacaagttgttcttcgtgtgcgtgaacgtccttatagtcgtttggaacctggaataggatatggctcaggtgaattatttggcgaattgtcatttcaagataacaacttatttggacgcaatcagtatctccaatttgactttcagaagagacaatttcaacattcagtattatctttagagtttgaggatcctcgtgtaggacagttatttggttatcgtctcaaagtatatcgtga

SEQ ID NO: 1871 - DNA, 433 bp, Cyanidium caldarium
  unsure at all n locations
  Clone ID: LIB190-036-Q1-E1-F6
agctgggtggagtagcgaaacaagagaagggaagtaaaaggtaagaaagaggaaaggtttacgagagaaggaagtagaaagaagagagtgtaaggcggcgtcataatagaaatccgaaaggagtagaagaaaagagagagaagaaagaaaagaagagaaaagccgtactgaagaccgacacaggtactcgaggagaaaggagacccaaattaaggtggatagtcgagaggaaaaaagcccagaagccaagataaggtatcaaagtaaagaaagaaggaaaaggagaagaagagagggtaggcttagaagcagcanaccagagaggaaagcgttaaagcatgaaagaaaagaaatccgaaaaagaagagaaaaaggtaagaaagaggaccgaatcagggtaagaggtanangagcaagaagagaagagagaatg

SEQ ID NO: 1872 - DNA, 338 bp, Cyanidium caldarium
  Clone ID: LIB190-036-Q1-E1-F7
gacccacgcatccaggcaattgcagcaatttcggctaattgttgtggaacaagataacatgtcgacccagaacgcagtaggctctgccaacttgagaaggtgagactaggggtactttatgattgtctactaagtgaaataaggagaaatacggcttcacgcagttccggtttaactagttctggtacgagcacctcgacgaagtatttttccgcgcgactgtatgagcgacgatccaaccggtttgagagtgttggttctgtgtgcttttgttggttcatttggctgatttcgtttacgggatcgctactgcgttatgcttcatacctttgtcgaaa

SEQ ID NO: 1873 - DNA, 389 bp, Cyanidium caldarium
  Clone ID: LIB190-036-Q1-E1-G1
accaagcgtccgcgtgagggtagttcatcatggttgagacaaaacttcaagatggtgttagtgcttctctttggactgttcgtctcttcctctacacagttattttagcattctctgccactatcattggcttggatggacgtaaagcagacaacatatggaacgacagcttattctatgatgggaagtacattaacttttgtgcttattctgcctcttctgttgtagaaggaggggaccatggagcgtgtaaatatgtcatggcgttggcgtctataagtttgattctagtctttttcttgtggctttttacatttgtagatgcgttgtatcctattcttaccaagttttggtttattgaattgggtatcaacgtgtttcaaacaatg

SEQ ID NO: 1874 - DNA, 438 bp, Cyanidium caldarium
  Clone ID: LIB190-036-Q1-E1-G10
gccaacgcgtccgagtcaataccgtcgttgttcttattgctacttgtagtggcagaatatccatctgttggtggtgccggtggttgtcgtcctcgtctgctggtgaagagtttcttcgccgggcttttattctcgtcgtcatcgatagcaagatatttggaaacgagttcttgtacatttgggtctatccagtggctcgtattttcttttgtcgtgttggagtaggcaactaccgatgatgatgaaatagcagtcttgtcgtcggaataggaacagttgttgctagcggtaaccaaggaagcaacgctttttgaatgagttggttggtggtggttgacttgacgaccatagtcggtttcccaaaacactcgagtggtttcttcttgagctgctggtgatgatggctgtcccaccagttggttccaagaaccacagcgt

SEQ ID NO: 1875 - DNA, 384 bp, Cyanidium caldarium
  Clone ID: LIB190-036-Q1-E1-G12
caagcctctacaatgacgtcgtactaacgcgtgtgccgaaatcggctgtgaagcgctatagcgggaactatagtaaaggggatgcccttgtgggataagatctcaacaccaaggtttcagtctttatatacaaatgtccttttgaaactaatatatgatacagtcttctcattttcgttgaactatattacatgtacctctatgatctatgcaatatgtgaaaatagtggaatataattctttacggatccaggtatatttattgatgtacaccactatcactacacaagttggagatataatttattttaatcgtgtactactgttactacgtaatattcgaacttagatatgatatctgtttacttacaatataagtttact

SEQ ID NO: 1876 - DNA, 429 bp, Cyanidium caldarium
  Clone ID: LIB190-036-Q1-E1-G2
acgcgtccaaaaaatgtggttggtcggtgaaaaccatggtggcagcttctccttctcgcaagttggaaatacaatgtggagtattgaaaagaacgttgaaagatatatccgcttatcaaaaggagtttaccgagatgaaggagcaaatacaacgggcaacacccgatcaaccatatcagcaatggcaaaaagtgttggaagaaacggagagaatggtatcggactcgtataggaggttatcggaagcggtagacagtttacaaaagttgcaaacgcagatggaaaatttgcgaggaaccaaagaatgggaacaagccgatgcgttgttacaagaagcacagcaggttttatcacaaacctcgaaagtttaacgaaacaaagcaatgtattgaaactgcgtcgacttgttcaagatgcgagcatcgtaat

SEQ ID NO: 1877 - DNA, 261 bp, Cyanidium caldarium
  Clone ID: LIB190-036-Q1-E1-G3
taaaaccgaagtcacccaaaatttgtacttttttgtcaaaaacgccgattaaaggaaggcctgacgtaccacaattagacaaggtaggttttgaatgtgaaaatcagtttgtagccggcaacggttttgacggtgatcaacgtttgaggcaccttgatttcgttggcatatacaatacaaaccgatgagagaaacggcacaaggggttttccgtattgtggctggaacaccggctacttgaataaaagaaagtatttgtgg

SEQ ID NO: 1878 - DNA, 421 bp, Cyanidium caldarium
  Clone ID: LIB190-036-Q1-E1-G5
agcgaaagatttgtctcgaatctttcctcagcaagtccaaggattggctgcgaaggctgacgaatatgccagagcactgtttacaggtggtggcactctattcgaagaactaggtttctattatgtcggtcctgtcgatgggcactctttagaagacctcattccaatactcgaaaatgtacgagatatgaatgtgaataaaccagtcctcattcatgtaaaaacagaaaaaggtcgtggttatcctccagcagagaaagcgttagataagtatcatggtgttactagttttgacattgaaactgggaagcttctgaagaaacaagagactaagtcaactccagctcctgccagttattctaccgtattcgcaaacacattgattcaggaagcagaagaggatcgtaagatcgttgctatc

SEQ ID NO: 1879 - DNA, 395 bp, Cyanidium caldarium
  Clone ID: LIB190-036-Q1-E1-G7
acccacgcgtccgcccacgcgtccgtggacttgtccgatagcaatggctttggattggcttccagtaatcatcatcatccacatagtaatagtggtggtggatgtgaagatattcgcgattgttggagaaaagaatttttatttctgccatcacgtgaaagctatattgaatattataatcatatttccaggcgattgtgtaatcttaccgagtcgttgtccatttcctccttacttgtctagatgggataaaaaaaagatatctgaaaaaaaaaaaaaaaaaaaaaaaaaaaaaaaaaaaaaaaaaaaaaaaaaaagaaaaaaaaaaaaaaaaaaaaaaaaaaaaaaaaaaaaaaaaaaaaaaaaaaaaaaaaagggggggcccccctaaaggt

SEQ ID NO: 1880 - DNA, 423 bp, Cyanidium caldarium
  Clone ID: LIB190-036-Q1-E1-G8
gacccacgagtccacgtgatacagagtaggaagaaaagagaagagagctagaaaggaggtaaaagaagagtaaaaggactagaagaggtacggaattcacgaggaaggagcgtgaaggaaggaggaatcccaagtaatcgaggaagaaaaagcttcggtgaaagcgtgaacggattttgtacacactgcccgtcaagttctggaagtgtgctaggaataagcaggagaagtagaagagagtaggaaaagaagaaaggaagtgaagacgtaagacgtgatacagagtaggaagaaaagagaagagagctagaaaggaggtaaaagaagagtaaaaggactagaagaggtacggaattcacgaggaaggagcgtgaaggaaggaggaatcccaagtaatcgaggaagaaaaagcttcggtgaaag

SEQ ID NO: 1881 - DNA, 379 bp, Cyanidium caldarium
  unsure at all n locations
  Clone ID: LIB190-036-Q1-E1-H1
agatattgcagctagtgggaaagcggaacgaaatgatctccaacaatggttctcaagtttgcacaaaatgccaaaaagcatcaaatagttattcccaaacgttacaaaactcatcagtggatgattgtttcaacttctgcgaaaactggcaatgcatctcctgctacacagtgctatacttcgcacacttcctatcagaaccttgtaaaggaagtagaaaagaaatggagcacaggaatgcgtattgttttgttaagtttcactgcangaatgtggactgcagtattgaatcagaagagcactggctatcaagagcaagctttacattattgtccaggagctgactttccacgagaatgggttcgacagaaatgggatg

SEQ ID NO: 1882 - DNA, 465 bp, Cyanidium caldarium
  Clone ID: LIB190-036-Q1-E1-H10
cacgcgtccgaaagaggaaaaatggcaagtcgaggagtacgtggttttcagttgtttagtcgcctgttttcttcggttactagtcgtccaattagtattccatggatatataggatacctatctcgagttttactacagtgacttctttaaaggtctcttctaggggcaacatgaatacaaagcttgtacctcaagtattcaaacgtcgactgtttctacaaagccaaccaacccccaacccagactctgtcaagtttttacctggaagagaagttattcctgacggaaacagtatcgactttcccaatgcacaggctgctcaaatttctcctctggcaaaaagactatttcagatacaaggcatatcgtccgtatttctaaggccggatttcgtgactgtaacgaagaaggaagatgttagttggtcagtattaaagacagaaatatttgaagcaatactggag

SEQ ID NO: 1883 - DNA, 450 bp, Cyanidium caldarium
  unsure at all n locations
  Clone ID: LIB190-036-Q1-E1-H12
acgcgtacgcctacgctgcgtgtttgcaatgtgctggaatttatttcggctacaaattgaaagattttttggctttttcattggaggttgaaaactgcatatctttgatacaagtgttgatttgtacttttattcgagaatatcttatgctttcgcgaccggagtgtagtttgatgcaatgtgggacgagttggtcgtcgttactgaacacggaatctttgcaagacgtgtttttggaaaagcgtacaaatagcttgagacagtctgacgcaattctttacgtccaatattcacttcaaacacttcattttatgattcatcgcttgaaggagagaggtagctcgttgaactttctgttgaattacagtgtaccgttactttcggttttgaaggcaattatcgnaagacaacaacagaatttcccatttctgaaggaagcgagtgaaatat

SEQ ID NO: 1884 - DNA, 433 bp, Cyanidium caldarium
  Clone ID: LIB190-036-Q1-E1-H2
ccgggccgacccacgaatccacccaggctggttgcctctatgtcggacgtcatggaagagaacgaaaaaatgcaaaaaacggtacacatattgattctaacaatcaaatgtggataaagaaaattgacccaaaaggccacgtggaacatatagattggtcaagaaacaacaatgcagtgagagatgctgttggagccagttttccaggatacttagaaaatgaagctgtggtttggagtagcaaaagacgaaagtggatatttctccctcgacgttggtcgttggaaccttatgatgatgaaaagaatgagtttcgaggttggaataagattattatttgcgatgaagattttttgcacattcgaatgttaccgttgaacatggaacttgaggaagaaaagggcttttctagtgccaagtttgttcctggctc

SEQ ID NO: 1885 - DNA, 328 bp, Cyanidium caldarium
  Clone ID: LIB190-036-Q1-E1-H4
acccacgcatccacccacgcgtccgggttggctcctgtttacatgcggaggcaaacctgaacctcaaaagcttcagggaatacgtgcaggtttaataccggatatattggataccagcagaagttttcaacttattgcaggtaatttcagccgatgcaatcgcaatggcacgaaggatggcatccgatgaaggtttattggcaggaatatcttcgggagctgcatttaaccctccatttgctattggaaagagaccggaacatcgagggaaacgaagattgtgtatgattccaagtttcggagaacgatatatgacaagtgcaacgct

SEQ ID NO: 1886 - DNA, 422 bp, Cyanidium caldarium
  Clone ID: LIB190-036-Q1-E1-H5
acccacgcgtccgcccacgcgtccgcggacgcgtggggaaaaatctcgctggaagacatttcacctcacattttgtgacaatcattccatcctacacgcatttttactcattgttggttgaaacgatatggcagagaagttgacagagatcaaggataaagttgccgataaaataagtgaaatgactggaaacaagtcacctcaggaccaggcgaaggataaagctagcgaggcaggggaccgtatgaaggatgcaggaagtgctatgaaggaaagtgctcaaaatgcaggggacgccgtcaaggataagatgtccagcatgaaggagtctgtttccaacaaagcggaaggtgtgaaagaaggtctgcaaaagtagatactccgaggttatctcatttgtttcgtcttgtttgtggttaaat

SEQ ID NO: 1887 - DNA, 417 bp, Cyanidium caldarium
  Clone ID: LIB190-036-Q1-E1-H6
ccacgcgtccgggggcaagttgacctctgctttgccacctttttttggctgtccctcatgtgttttgcctttttaaagcttgaagactatttccttttatgatttagggatttctccagaggtttttgtactagtattattcagtccttcgtggtgaatgaatgactcctttgacaacaaggttgtcattttcccgccatctccacagcttcaaccgccaatttgtgtccgcatatatacatatatttgtacagactcgtggtgtagaaagaagagtgcaagtggttgaaaagtaacagcagagggttagtatacctgtagaggaagcacttgaaaaaggggtcacgtccttttacatgtctacaagtatttttttgcttgtagaaattgcaagtttagtgtactcgacaatgtttc

SEQ ID NO: 1888 - DNA, 371 bp, Cyanidium caldarium
  Clone ID: LIB190-036-Q1-E1-H8
acgcatccgcccacgcgtccgggttggttggggtgagcatgccgccgcaagtagaaacaagtacaccttctggtattgcagtaggcctgaataaaggacacgccgttacgaaaaggaagttttcaaccaaaggactgaaaagggagaaaaaacacgccaagtttgtacgagaaatcatccgtgaagtttgtgggtttgctccctatgagaagcgaatcatagagttgttgagagttgggaaagataaacgtgcgctcaaatatgcgaagaagaggttaggaacgcacgtgagagcaaagaagaagagagatgagatggccagcgctttacgtcgtagtgcacggaaataaaaatagaaaatattgggctgt

SEQ ID NO: 1889 - DNA, 408 bp, Cyanidium caldarium
  unsure at all n locations
  Clone ID: LIB190-037-Q1-E1-A1
acggacgcgtgggcggacgcgtgggaaaaaaaaaaaaaaaaaaaagaaaaaaccaaaaaaaaaataaaaaacagacacccttaactaagaccaaccaatttgctaactacccaatctagggggaaccttttgacattaatttacaaaaatggtgtctgcaacttaatttaacgaatttcatttgggaaattcaaaatttggcaaaaaagtttttgatggtacctgccggacaatcctaagcatgatggataggctggaaatgcgcgtggagaagatatcgtgaagaatgagccatccatatattatagaaatatatatatatatatatatattggtgacatatataaagcaatagacacaagttgggtattatttcanaaaaataaaaccgccaccacgccttgcaat

SEQ ID NO: 1890 - DNA, 256 bp, Cyanidium caldarium
  Clone ID: LIB190-037-Q1-E1-A11
gtgatgtcagaattgttatggcatctcgtgaaatgccacaacgcattccaaataagaagaaaaggagtcacgctttcaacagagaaaggaaatttaaagggtgtcagtacttttaaatattcgggtcatgctcaaccgaaggccgtcgacattgctccagctacagaaacttttggtattttgtactcgaagaaacgtaccaagaaagatgctgctcgaaaaccttcgacggaatttcatactgatgtcgtgaaaa

SEQ ID NO: 1891 - DNA, 391 bp, Cyanidium caldarium
  unsure at all n locations
  Clone ID: LIB190-037-Q1-E1-A2
aatcattgtcatcatgaaagctgctgtctttgcattctttgtcttagcactatgcgccgttgctattcaagcttctcctctagaggacactttgggtgcctttatgcggggtggttatcaatcgcaaagccaagcaccaaaacctagctgttgcaagttgagctgtcattatacccaaatttgtgaacaagttatcgtccaaactcaacaggtcgtccanactcagcaagtttaccanacacaacaagtacagcaaacacaacaagtttcgtcagcatacggacgcaatgaggtatccananggggatatggccaacagtctgtagccccagctcctgcaccttcctgtgtcagtgttccagtcaagtgctgtattgagtgctcgtcttgc

SEQ ID NO: 1892 - DNA, 227 bp, Cyanidium caldarium
  Clone ID: LIB190-037-Q1-E1-A3
acccacacgtccggttatacccaaaaatcagggcaatgcaattcataatccaagttgaaacaaccacaggaaaacttgcgtctactcaaggagacaatttgcgagcattgaaactcgggcagaggttctttgaaacaccgaacagataaaatcagtgaaaacttgcagaaccatcaagcgcgtgtcatgaacgcgtaagtaattgactgcttacgatatgtcgtcga

SEQ ID NO: 1893 - DNA, 346 bp, Cyanidium caldarium
  Clone ID: LIB190-037-Q1-E1-A4
gtcaaattacggtcgagcacgcgtccgaccacacgtccgcccacgcgtccgcggacgcgtgggcggcacaggaagaaacggctattcctcctccaccattcttgcgctttctctctcaatgcaaccacaagataaaggtattcccgaaaattgtcaacttgacagagtacctctacaagaaaagaatcaatccgttcatcaccttgctccaaccgacgaacatacctcgaaacatacatcgacttgttatcctccttctctacaaagaaacacactttaccaagtatacgaaatgtatgcatttcgtggtggtggcgtagggtttcgaaaaaccggaatgaaagta

SEQ ID NO: 1894 - DNA, 381 bp, Cyanidium caldarium
  unsure at all n locations
  Clone ID: LIB190-037-Q1-E1-A5
cgtccagttatacccaacaagtattgcaagggacgagaaaaggggatatatcggtaggacgatatatatcggatactttatcgatgatacctcaattggatagtacaagtatagagaaactgtttggagatcagttgagagatgtgttgatgatactttatttagacaagttgatttgggcaaatgcaaagttggcagaaaagtttttgatggtagctgccggagaatcctaagcatgatggataggctggaaatgcgcgtggagaagatatcgtgaagaatgagccatccatatattatagaaatatatatatatatatatatattggtgacatatataaagcaatagacacaagttgggtattatttcanaaaanaaaa

SEQ ID NO: 1895 - DNA, 205 bp, Cyanidium caldarium
  Clone ID: LIB190-037-Q1-E1-A7
acccacacgtccaaattcattccatccttccgaagacgattggatatttgccaatgatgcactactttatggtggtttacgagaagaatggccatcgaatagtccatggttggaatggaatcgtccaccacaacaacaacaacttgattccgtataaccaagaaaagataatcacaaggaagatatttgagaagaagttttttcc

SEQ ID NO: 1896 - DNA, 372 bp, Cyanidium caldarium
  Clone ID: LIB190-037-Q1-E1-B1
cgtccaatgcaatatccaatgaagagagccttttccaaagtatcctttccaaaatataacaaacctgagatacgtacagaaatacctggacccagatcaaaacaactattaagtgagatgaacgtgcttcaagaaacaaggactataaacttttttatgaacacagccaagagtcagggaacatatgcagtggatgccgatggaaatgtaatattggacgtttttggtcacattgcctctttacctttgggttacaatcatcctgcaatggcggaagctgcttccaaacctgagtggctaccgtttctcttacaaagacatgcgctaggtgtacaaccaccacgaagagtggccaagagagctaagagaaac

SEQ ID NO: 1897 - DNA, 356 bp, Cyanidium caldarium
  Clone ID: LIB190-037-Q1-E1-B11
tgcaactctttttggtatcgctcatatatgatgccttttcagtagcgtgaagaccatttaatctatagggatttatcaagttctgcagagatatctcgtacgagtccttttccgtgtttcgtaaagggtgaaaggctcctttcacaacacctttgtcatgatcccgccaatctccacatcttcaattactaatttgtgcgcgtatgtacaagtatatctgttcagacacgtggtgtagacagaacattgcaatggttgataagtaattgcagagtactaatgtacttgtacacgaaacacttgacaatcggtcacgtcattgtacatgtcaacctacaatagcagtcttttgcacg

SEQ ID NO: 1898 - DNA, 413 bp, Cyanidium caldarium
  Clone ID: LIB190-037-Q1-E1-B3
cgtccgaccacaagtccgcccacgcgtccgctgacgcgtgggctttgtggttatattgaacaagttccaactttgataccactttttgcaaccgctactgagttccttttatacaacttaacctttctaacgaacaaaggaatgaaactagttgaatatgtgaattttctgacttggggtataagatggacgttacaacgaaacttaaccaactcacaaaggaaacagcatttcctcttaattctaactacgccaacactgtgtcagtagccggcgggaagacgagtttggaagaaaagcgtcttgtgctattcaacttgagagaaagaaacaaactgtacagttagataatcgagaacagaaggttccttcgacaacgatggcgacaaaatcgcaataggccactcaaatgt

SEQ ID NO: 1899 - DNA, 426 bp, Cyanidium caldarium
  Clone ID: LIB190-037-Q1-E1-B7
agttgcaacttttgtatctcatcgtttgggctgtaaatgttgctaatggaacagggtaagcaacctaacattatatatgttgaaaactaaatgaacgaaaagaagctggtgtgagcatggaagtgcccactattagtgctgccaaacatgactctgaagatagccacgaagaagtgaggaagcggttgagtagagtaagcgctccaccgtttcccgatcctacttctctaggattatctggttttagttgcacaactttcattcttagcgtaatgaatgccaaattattgccagcgaggattgtaccaggaattgtagggcctgcctttttctatggtggaacggtacaaatgttggcgggccttttatgttttgtcactcgtaacatgtttggattggtggcatttacttcatttggagcttttt

SEQ ID NO: 1900 - DNA, 391 bp, Cyanidium caldarium
  unsure at all n locations
  Clone ID: LIB190-037-Q1-E1-C3
cgtccattttgattgtggtgaaaccgtcgtgaaaccaagttggcttcgatgaatgatgaagctctaagtagttgtattcaacggttggggaagatattcaaggaactaagtgacgtgtttttacggttcgcacaaaatttgccccaacaacatgcttcttcgcaagcgtctcgacagcaaccgtctaatgttcgacaagatgtttcttcacaaccatctctacagcaacctccaacttctaatgttccacaagatgcttcattgaaatcgcctcgacagcaacctccatcttctaatgctcaacanaatgcttcttcgcaaccatctctacagcagtcaccagcctcgattgctcaacaagatggttcttctcaagcgtcacgacagcaac

SEQ ID NO: 1901 - DNA, 437 bp, Cyanidium caldarium
  unsure at all n locations
  Clone ID: LIB190-037-Q1-E1-C4
gggccgaggcgtgggcttattggaattgaaaggagggtcgacgagctcagcttgaagaacaaagaacttgcgtggggttggacgttatttatgaacttggactctattgacacaggaattaatgctccttttgacccgtttgcagacgcctcacgtggagaggacgcagcagtaaccaaaaatatagtgcatattcgcttgcaacaaagaaacggccgcaagtgcttgacgacgattcaaaggcttgacacanaattggatttgaataaaattacaaaggccttcaaaaaagagttttgtttcaacggttgtgtcgtaaacgacccaaaactgggaagagtcatccaactgcaaagagaccaagaggatanagtcaaaaagtttctagttcaagagaaattagctganaaagacctgataaaggtgcacggtatatg

SEQ ID NO: 1902 - DNA, 250 bp, Cyanidium caldarium
  Clone ID: LIB190-037-Q1-E1-C5
aggttgacagggaattgtgcgctcttcgtgataataagccggaaagaagcaaacgacagagaataagaagttacatccataacctccttatcttcaggggagagtgtgaacagtgggtcatgagtttcaaggtcaagattacactatgggtatggaaataaaatcaggcggtattaaagaagttgaggagtatcccgtccaagtaaatggttgactgagacctgaggaaacgttgatggtacatgacaga

SEQ ID NO: 1903 - DNA, 408 bp, Cyanidium caldarium
  Clone ID: LIB190-037-Q1-E1-C6
agttgtggtcatggcagatttggtcgctgcacattacccgcgtaaagtcttgtgctatgcattccactttcttctagtaccaaaaacaacgagtttaaaaactcaagtctcgataaagccttctcatgtatgccttcgatacccaaaggtcaactcttttcaaaatctcaagtttctggtgtgttctccaagagaaaacgttcgcaaaccttccacctggcttattcatatgtccaacgatggctataaaggaaagccactgctcgatacatcttttcagttgtacaaaaaaatcgcaagttctgcgacttaatggtacctccaaggagatttggcggcttctcttcaaacaatatatcggcgtgccttgtttcagggagttagttcacagagcatttcgtgggcgct

SEQ ID NO: 1904 - DNA, 393 bp, Cyanidium caldarium
  Clone ID: LIB190-037-Q1-E1-C7
gtccagatgtggtcatggcagatttggccgctgcacattacccgcgtaaagtcttgtgctatgcattccactttcttctagtaccaaatacaacgagtttaaggactcaagtcgcgataaagccttctcatgtatgccttcgatacccataggtcatctcttttcaaaatctcaagtttctggtgtgttctccaagagaaaacgttcgcaaaccttccacctggcttattcatatgtccaacgatggctataaaggaaagccactgctcgatacatcttttcagttgtacaagcaaatcgcaagttctgcgactttattgtatcctctatggacgttggctgcttctcatctagcaatatatcggcctgccttgtttcaatgagttagttcac

SEQ ID NO: 1905 - DNA, 339 bp, Cyanidium caldarium
  Clone ID: LIB190-037-Q1-E1-C9
gcgtccatgggaatccgcgcaacttggcgccatgttacgttccaatccaactgcgttcctggtatgggtgactgtagctagttccgctggttatgtaaagctgcacagagatgtaaaatatgcaggaaatatacttacttcgagtatacaagagtggtccgatgaggtaacccaaactaccaaagaactggatagtaaagtcctttttttagaaaaggagttgaaccgcattagagaactggcaaccgtcgaaaaggatccaagttctccttcgagtggacaaagtaatcaataacgcaccgctactagtccttatttctgtcgagtatgttgcctggt

SEQ ID NO: 1906 - DNA, 268 bp, Cyanidium caldarium
  Clone ID: LIB190-037-Q1-E1-D12
catgggaatattatttggcagtttggtgaatgcatctgcaacgaacccacttttgatccatcagttatttggatacacgatattagggtttgcgttaacaccaggcagtacgactgtttgcattgatgatgagttttttgctaccgttttcatactatatgacgaaacaagacgtagaagataaactttcagagacagttagacgagttatgagagaaaagatggaacgtcctataactggtaaatggactactaatgaatcatatga

SEQ ID NO: 1907 - DNA, 403 bp, Cyanidium caldarium
  Clone ID: LIB190-037-Q1-E1-D6
aaaagaccccataattcttgactagataggtttagggaggagagagaatcatgaagtacaggaggtggggtaagagatgaaagaccactgcatgaggataatgaatctaactgagtaaggaaaataagcttaagctagtttggctggggaagtaaagcctaagaaagagtaaattacgcaagcaaaggcatgagagaagtataatagcagaagcatgcttgaagaaaaagaaagagatttcagaaagggaagaaaagtcagctatagagaacaggtgaacgagaactcagaaagaggagagcaccgaacgatcgaagaagaaactttgggggtaacaggttaatgtggtgttagagaacgtatcaagcaccacgattgacaactcgatgtcgggtcatcacat

SEQ ID NO: 1908 - DNA, 434 bp, Cyanidium caldarium
  Clone ID: LIB190-037-Q1-E1-D8
aagagagatggggatatgctcagcaaacccaacaacagcaacagtgccaacaagtatgtaaacagtatgcatactatcagagtccagtctgcacttccgtaaccacacagagcccatactggacccaatgctcgaagactgtgcaaacctttgtcccaagccagtgcagtacttatacccaatctcctacatggacctattgcagcacctacaccaccactagcgtaccatctcaatgcagcaaggccgtgactacctatactcaaacctgctgtgcttatgcccaacaaacttcctatgcagtcagtaccgagcaatatgttcaggaaactgtatctgctcaatatacttcttactacggcgaatcatcctccagctattattaccgagcagctgctcctcagagatggtatgaggaacaatgcaactcatac

SEQ ID NO: 1909 - DNA, 197 bp, Cyanidium caldarium
  Clone ID: LIB190-037-Q1-E1-E11
gtcgtgacatttgccaagaagggagattcggatttgggagtacaagtaattcctaactagttttctttcagtgtggattgtgatatagtgcatgatgtttctgaaaaatgtcaagaggtatgaagatagaaaaggcaatcatggttaaaagtaaagtgaatcgggaggcgtttatcaggaagcttgtctagtcgaac

SEQ ID NO: 1910 - DNA, 415 bp, Cyanidium caldarium
  Clone ID: LIB190-037-Q1-E1-E2
ggtcagaattacgggcgagcacgcgtccaggctaaaatggtggaggagacagtctgatggaatatcgataacggaagaacagaacttctttcatggttgctttctagacacgcttctttcatgtggacaggatagtgtgtttatgcggacacgtctgtttcctttgggcgtcctttttgttacacgacacttctcatcttgtagcacactctactagatttcctagaaatatataagaaccagttcgagttgttattatttatagccctcgttatgttggatgcaatactgttcgccaagcctttattcaatacaaagactctcaatattctggattttcaagtgcatctggctgatttatagcatgccactttttaaacgcgggtagctcatccaatgtcttggcaactctcac

SEQ ID NO: 1911 - DNA, 413 bp, Cyanidium caldarium
  Clone ID: LIB190-037-Q1-E1-E3
gcgtccattgaaaatcatggtagacactaaccttaaggacggtgctagtgctgctctttggacttgccgcctatttctctatacagttgtgttagcattttcagcaacaataattggacttgatggaaggaacgcagataacatatggaacgatgccctatattatcatggaaaagtggtgaacttttgtgcatattcggcttcgtctgtttttgaaggtggcgaccatggcgcatgtaaatatgtgatggctttggcttctatcagcttgattttagttttctttctttggttggcctcctttgtcgacgcattgtatccaattcttacaaagttccgggtttgtggagtttggtatcaacatattcccttactatgtggtggttggttggtgcaattgtggtgactgcaaa

SEQ ID NO: 1912 - DNA, 396 bp, Cyanidium caldarium
  Clone ID: LIB190-037-Q1-E1-E4
gggccgagccacgcgtccacccaaacgtccgcactggtagatcatctttgagagagaatgtcctttcctttcgtttccacatagaaaagtcacggaaaaacattttgaagcagacctgccgaattttccaagagcactagtctatggtgagacaagtttagcatcctttgtggcgtccttgctatcgatgatgagttgctttgacctgcaactttcgttcgcctcaaaacgcgagacagagcagacttttggtccagaacaggaaacgacagtcattccttatgaaatatgcttcaaatatgcgtcaagacactctgtaacttggcgactcgtctaggcccactgtatgttgccacaagagtgttttacgagatgaatgggaacttgttctattca

SEQ ID NO: 1913 - DNA, 394 bp, Cyanidium caldarium
  Clone ID: LIB190-037-Q1-E1-E5
acggacgcgtgggcggacgcgtgggcggacgcgtggggcagaagccatcttgcaattgtatatgatgacgtatcgaagcctgaaggagaacgcaagtttatgggtatcgttactttggaagacatcattgaagaaattcttcaggaaattgttgatgagaccgatgtttatatggacatgaagacaaagaaacctgttctctttcggggtccagatggtcgcctacatcgcagagcttttatcggaccgaaaaagccacatactcaaataacaattagagagattgacattggaactttaaagcatagttcgagcgacccaaatctatccgttaggagaaaaaaggcggtagaaaacttcaataagcaagtgatgcgcggcgatatcgatgaat

SEQ ID NO: 1914 - DNA, 420 bp, Cyanidium caldarium
  unsure at all n locations
  Clone ID: LIB190-037-Q1-E1-E8
acaagtatacgctttggtttaggtcgatttacaactgaaaaggaagtggactttactgttgagttggcaaagagacatgttgcacgtttacgagaaatgagtcctttatgggaaatggtacaagaaggaatagacttgaagagcattcagtggacacaagagcattgaatgggaagcgagatgacaagttctatcagaagcagcagcagcagcagatgtggttttgccttctattcttgtaggtatggcaagaataaactgcaacagacacttgtttgttgttacaaaagcaacttgcaatcatcaaaaaaaaaaacaaaaaataaaataaaaaataaaaaaacaatcaaaaaaaataaaaaactaatattcatcaaaaactatataanataactaatacaaaaaaaaagggggggcccc

SEQ ID NO: 1915 - DNA, 434 bp, Cyanidium caldarium
  Clone ID: LIB190-037-Q1-E1-E9
acgcgtccacccacgcgtccgcccacgcgtccgcccacgcgtccggacaagtggttgctggaattcgcaactacttttccaaggatgaattgttgaatcggacggttatcgttgcgtgtaatttgcaaccggtggttttggcaggtgtcgaaagtcagggaatgatattgaccgctgaaaagaaaggcaaggtgcatcttttatcctgtgaaaagtgggatgaagagaagaagaaactagaagaggctcctgcactaggtacgttggtggaaatagatggcggcgatgtatccaaagcatcgtttccgatattggataggaaaggtttccaagacgcgagtaaatggttgaaaattgacggacaaggacatgtagtattccataagaagcacaagttgatggccaaaaattgcgtagttcacggcaacggtgcc

SEQ ID NO: 1916 - DNA, 349 bp, Cyanidium caldarium
  unsure at all n locations
  Clone ID: LIB190-037-Q1-E1-F10
cgtccacgagaaaaggaagtagaaagaagagagtgtaaggcggcgtcataatagaaatccgaaaggagtagaagaaaagagagagaagaaagaaaagaagagaaaagccgtactgaagaccgacacaggtactcgaggagaaaggagacccaaattaaggtgagagaatggacgataaggaactaggcaaaaggatatggtatctgcggtagaacatatgaaagaagcagcaccgactgtttagcanaaacacagcactctgcagaaaagagaaaatgtaaagtatagagtgtgcggcctgccaaatagtagagaagaaatcgatganagtgaaagcgagtaaaagatg

SEQ ID NO: 1917 - DNA, 326 bp, Cyanidium caldarium
  Clone ID: LIB190-037-Q1-E1-F11
gcgtccagaataattcggcagaggcgctcttcggcgtacaacctaacaaggaagaactgaaaaaagtattgcaagtaaacgcaataacttaagcaacatattttgctattattcgtgctaaaccttttgttatcgatgtagtaaaggctattttccagaaagagtagaaggcttgagttttggttttgttggcttgtattcttggaatgttaccaactgaagaatcatttggaggctaaatatgttgtgagtgttttctggtgtcctttgtgttgacagtttgttttttttgaaaaactaaaaatatgatacaaagtgcaccaaca

SEQ ID NO: 1918 - DNA, 424 bp, Cyanidium caldarium
  Clone ID: LIB190-037-Q1-E1-F4
gcgtccacgagagacgagaactccagaaattggagacaagttttcatctcgacatggacaaaaaggagtttgtggtttgattgttcctcaagaagatatgccattcaatgaacaaggaatatgtccagatattattatgaatcctcatggatttccttctagaatgactgtaggcaaactattggaattgatggctgccaaatctggagtattgagtggagaattaaaggatggtacagcctttggtggcgatcctctggaagactgtgcatctatgctcgttcaacatggcttttcttatacaggaaaagatattttatattcaggaatgacaggagagccattacaagcttatgttattatgggtcccatttattatcagaaactaaagcatatggtaaaagataaaatgcacgccagagcc

SEQ ID NO: 1919 - DNA, 427 bp, Cyanidium caldarium
  Clone ID: LIB190-037-Q1-E1-F5
agagagttccagttggatgtttaaagaaaagggacaccggaaaatcagaaacaagttctgtaggcgaaacagaagttgtctcatccaacgacagagaagttttgcctcaaagcaccgtgttacaaagagagagcggagcggtgcaaaggcaaaaaatcaaaaacaaacaaaacagccccagcgtcacatacgacacatcctcagacaccgaaattcttaactgaggaacgagcacttcgttatcgagaacgacttgataagctccgagaacaatccaaaccgttcatcgaacctaaaactccgaaaaaatatgggcttgcttggaaaccgataccaactcaggctacaacaccacacttccgttcagactccaggctccgtcactgtgtagaaaaggcgatccttgaacgtaacaaacagagttttg

SEQ ID NO: 1920 - DNA, 356 bp, Cyanidium caldarium
  Clone ID: LIB190-037-Q1-E1-F7
acttgcaactcataaaggcactcgaaagcttgtcccttcctgtgaaacaaatattattacagtctgaaaacaaggaagaacagcttgaatcagaagatgaactagcagaacgtttggaatggttattcttagatagtgagatagctgatatgctaaggcacctgatacagagagtccatgataacaaaatagtacctctacgatataagcactctactagaaagaagtcggatgaaaaatcaagtggtatttgctccagtggaaaggaagatttatcaagtcaaacgaagcaagtcgaaaagagacaaactctattgcttctatttcaagaacgagtacaacaacttgagaagaag

SEQ ID NO: 1921 - DNA, 337 bp, Cyanidium caldarium
  Clone ID: LIB190-037-Q1-E1-G1
gcgtccacggacacgtgggcggacgcgtgggatctacgtttcttttccaaccagcatattcaataggagcttctttttttggatcgaagaaataagaggactgttggaaaacctcttatatggtacttttctccaacttgatgaaacttccaagcatcaatggcagctaacacgatattggtattgttttcaaaaaactttgccgtctggatatagtcaggagcaaactgttgacaatgaggacaccaaggagcatagaatttaactagtacatccttgtcggtattcatgataaaagaagtaaaattggaagaaaaaaaaaaaaaggacccgcccg

SEQ ID NO: 1922 - DNA, 355 bp, Cyanidium caldarium
  unsure at all n locations
  Clone ID: LIB190-037-Q1-E1-G10
cgtccaaactaaattgacatgcaacanagtaaccttcgagtagtccaatcttctttggtggcaagctttgtcctcattctaagtataatctgtgccattcatgcagtaacagccgatgaaataacaagtttcgagagaggataccaaacagttgcaccaactcagacgcagcaatgtcaaaagatttgtgtcaccgccacacaaactcaagttcaaagttgtatttatactcagacacaggctccgttcatgtctcaatgtgtcacagcattgccaactacctgctataaatacgtaacacaatataagcacgtgtgctgtgagcaagaatacgagcaacagaattatcaacagc

SEQ ID NO: 1923 - DNA, 335 bp, Cyanidium caldarium
  Clone ID: LIB190-037-Q1-E1-G4
aatggttaatttaaaaggactccaaggaaattggttcggaggaacggtcaaatagaacccgcaatttaacctatcgatataaggcagttttgcaagaaaatttggccgatcagtttcaaagtttttccaagtttaatgaagattatgttgcgcgccaattgaaagaaagggaatgtagttatttgtcataatgatataaacgttggaaatttgtaaaaaaacaccacatctttacctgaaaacctgcataattggaatttgaaggcacgttgtagcagcgaataatagttgcgatagagagattgaaaagaggtttaaagtaaaaaaaagggggg

SEQ ID NO: 1924 - DNA, 398 bp, Cyanidium caldarium
  Clone ID: LIB190-037-Q1-E1-G7
acccacgcgtccgcccacgcgtccgcggacgcgtgggattctttgtgcttggacaatggttgcaaagactgctctgagttgcctctttctctctttccttatcgctgccgcagttgcagccgacgtagtttcagaggagagatggggatatgctcagcaaacccaacaacagcaacagtgccaacaagtatgtaaacagtatgcatactatcagagtccagtctgcacttccgtaaccacacagagcccatactggacccaatgctcgaagactgtgcaaacctttgtcccaagccagtgcagtacttatacccaatctcctacatggacctattgcagcacctacaccaccactagcgtaccatctcaatgcagcaaggccgtgactacctatactc

SEQ ID NO: 1925 - DNA, 395 bp, Cyanidium caldarium
  Clone ID: LIB190-037-Q1-E1-H10
ttagtaacgttatctcctgcagctgaccgtatagttggcctaggaaacaagaaagctttatgtttgcaaagtaaaaataatagaacaagtttaaaaaggccaatttcgtcttctagtcaacttttgcgaatgactggagctacttcctctgcttccgatgacagtgttccagatatgggaaagagaatgttcttaaactatgtcttgcttggtggtgcttccattccaatcttatctatgttgggtggttatgcatactttttctatccaccctctcgtggtggttcgggtacaggtactgttgcgagagacgtgttcggacgagaaataaagaaaaaggaatttttggaaacgaagaaaccaggcacgcatgagttggtacaaggacctaaagg

SEQ ID NO: 1926 - DNA, 343 bp, Cyanidium caldarium
  Clone ID: LIB190-037-Q1-E1-H12
cgtccagtgggcggactcttgggcggactcgtgggctttcgttgaaattagaagtactcctgcagtgatacaaatgctacacggaagtggacgggagcctggttactttggcgttgctcctttgggcttgggaaataacccgcaactctacaagcgatttcaattgtccgagttgtcgaacggtcgattggcaatgatatctcgtggaggactcaatcaccagtcatttcttactcatataggtgctattcaacagttgcatcatcatatatggtttccagaaaatcgtggtttgtgacaaggaatagttgtggatgtgggacactagaagaatatttttggc

SEQ ID NO: 1927 - DNA, 433 bp, Cyanidium caldarium
  unsure at all n locations
  Clone ID: LIB190-037-Q1-E1-H2
gcgtccacggaaacgtgggcggacgcgtgggcggacgcgtggggttattagcaccatttacggtaattggattggctattgcaggcgcgtccacctatgtcaaacacaagacaggacaagttgtagcttacacgataggaatggttatctatgatctgttttggggaagtgctttaggtgcagtgcctattgcagtcaattctgaagtctatccacaatatttgcgctccaacggtatgagcattgcggtgatagccacttttgttggaacctttacgacgacatatacattttcgagaatggtgcattctatgacaaagttgggtaccttgcttggtttctatggtggagttacttttcttggttgggctccaggtattttctttatgccagatacanaggatcttactttggaacanatcagacaagtctt

SEQ ID NO: 1928 - DNA, 313 bp, Cyanidium caldarium
  Clone ID: LIB190-037-Q1-E1-H6
acccacacgtccagatagagatgtggataatgtggggaataatgagtgtgagtaaggagataggagtaatgatgagtataagtatgatattaacggtagtgtatacgatatggatgtataaccgagtatataagggaataaggaaggagtatataaagaaggagatggacataagtaggagggagtataacagtataagtccgttagtggtaataatgataataatgggagtgaagccaagtatatggagtgaagtatggtaagtgtgtacataatagggatgagcctagtaatgatgaaaggccaatcaaag

SEQ ID NO: 1929 - DNA, 426 bp, Cyanidium caldarium
  unsure at all n locations
  Clone ID: LIB190-037-Q1-E1-H7
agaataagttttggcgccaacctggactttaaatatgcggcaaaacttgtccgtggtgcttatatggtgtttgaacgtcgagtggcagctgagaaaggttatgcttcaccagtttttgaccgtatagaggagacacacaagtgttataataatattgcagctagaatgatcaaccaggttagtcacaacagtgcctccgtaatgtttgcaacgcacaacttggattctatggagagagcagctactgaaatggctgaaaaacagctgcacgctagcaatcctaacgtttatttcgctcaattgtatggaatgggagattctatgacaatggccttagcgaaggaaggttataacacttgcaaatacgttccaattcggactgtacaggaagtgatgccntatttaactcgtcgtattgaagaaaat

SEQ ID NO: 1930 - DNA, 403 bp, Cyanidium caldarium
  Clone ID: LIB190-037-Q1-E1-H8
acacgtcaacgtatagctgctgttttcattgcagctttgtcccaaagtttaccaagtcaaaacggcttcaggttgatagatccactaggcattctactttacttgtagcttctacccaaactgcttctaatccaatgacgaaagtgccgagaaaccctaatttggcaaagttggaagcaggttatttgttccctgaaatagccagaagaagaagtgcttatttggaaagtcatcctgatgcgaatatcatcagtcttggcattggcgacacaacgcagcctattcctgcccacgtcgcgcaaaagatggctgagaaagctcttgcccttgcgacccctgaagggtattcaggatatggacctgatttaagggaagcagaacttcgcaaaaaaatatctcaacg

SEQ ID NO: 1931 - DNA, 379 bp, Cyanidium caldarium
  Clone ID: LIB190-038-Q1-E1-A1
gaagaagccttccgcggcgcgtgggtcggtccgggttgtcggggacgcgtcccgtttggttttgtgtggtatttgaatggcgaccaagagaataaccaaagatttgcaagacttgggtagagaccccccttctaactgtagtgcggggcccgtacgggacgacctctttcactggcaagctactatcatgggccctcctgactcgccatatgctggtggagtgtttttcctcaatatccattttccaaccgactatccgtttatacctttttttgtgcaatttaccactcgtatatatcacccgaatattaactccaatggaagtatctgcttggatattcttcgcgaccaatggagtccagcactgactatctctaaa

SEQ ID NO: 1932 - DNA, 403 bp, Cyanidium caldarium
  Clone ID: LIB190-038-Q1-E1-A10
gtccgaaagaaaaaaatttctctgaatagtcttcattccatgtttcaacaaatacatactgaagttgctaggtttacccaaaataagtaccaagtcactcatttggcaaacgatgtattattgaactacggactatcgtcttatgatggaaagaatgaaaatactcaagtagagcctgttatggatacccattcagttactctcaaagccctcgccaaattgcaagataaggtttatactttgcaagatgcgttggcacaatcccaagaagaagcaaagcgttataaaaagtctctatttgctttaagagaagaacatgaaatgactattcaaaggtatggcaaagagtttcagttgctttttcaagaattgcatcgattaagacataacaacaagaagaaac

SEQ ID NO: 1933 - DNA, 413 bp, Cyanidium caldarium
  Clone ID: LIB190-038-Q1-E1-A3
gtcgtttccaatagagacccgttgcaacttccttggaaagacttgaacatcgatctggtgatagaagcaaccggtgtttttgtggattccaaaggggcacggaaacacatacaagcaggagccaagaaagtactgataactgcacctggaaaaggagatgacgtgggaactttcgtcatcggagtaaatgaacacagctatgatcatcaagtacacaacatcgtgtctaatgcatcttgtacgaccaactgcttggctccatttattaaagtattgcacgaagaatttggtattatcaaaggtacaatgacaacgacacattcgtacactggtgaccaacgattgttggatgcagcacatagagaccttagaagaacaagttctgctgcattaaataacgttcctactactac

SEQ ID NO: 1934 - DNA, 239 bp, Cyanidium caldarium
  Clone ID: LIB190-038-Q1-E1-A6
aacttgtattagtagtcatcaacgtattaggtgcagaaggtgcacttcgaattatggctgcgaatcatgactacgaagactatgtcgacattccttgaatgttctctacacaacaataacaacggctcctgaataaaacaactcgttgttttttattcacaacaaaaaaactcaaataaaaaaagaaaaaagaaaaaaatcaagaacaaatcaaaactggaaaagtcaaaaatttttct

SEQ ID NO: 1935 - DNA, 333 bp, Cyanidium caldarium
  unsure at all n locations
  Clone ID: LIB190-038-Q1-E1-A8
acggacgcgtgggtgcaattggtgaacaatagtaagagagagagaattggctctcgttcttgtgacatatatatatatctatatatacaaatatacattaagccttagatatttacatctatagtataaaatggtatttcggaggtttgtagagattggaagagtcgtcctggtgaactatggcaaagaccgaggcaaactgggagtcattgtggatgtagtagatcataatagggcgttggtagatggtccactcacgggacttgcgagancaaacatcaactggaagagcttaacgttgaccccgttcaaagtanagattcaacactccag

SEQ ID NO: 1936 - DNA, 287 bp, Cyanidium caldarium
  Clone ID: LIB190-038-Q1-E1-A9
acgcgtccgattgttttcttggtagcagttgtacattcaacatcatcaaaatgcaaaaggaggaaagaaaagatcttcaaaagaaagaagcacaagtaaacctgcagcagcagatgctacaaagacgacagaaaagtctggtccggaagccaagttgaagggaactggtgcaaagaaacaataaaaagttgactatgcatgtgcagtcctgttatgttttgtgagttctgtttgatagtttccagctattcttttggtagtgaataaagagaaaattttttatattt

SEQ ID NO: 1937 - DNA, 419 bp, Cyanidium caldarium
  Clone ID: LIB190-038-Q1-E1-B10
ccgacccgtccgaggacgcatgggcggacgcgtgggcggacgcgtgggctccacaggccatcataaaatatgtcaaggctcacaatccgcagcttccggaagacaaacttaaacttcaagtaaagttagctttgcgtcgtttgttaaagcagaagcttattgagaaggtgaaagcttcgtataagattgctagcaagagtagtagagttaagaaagccccaaaagaaacaaaagcgaagcgagttgcgaaaacggttcaaaagaaacgagcgaacgatttgcaagagaaaactacgaaagctaaaaacggtaatgtgagaaaagaaaagcagaaagctccagaaccccccaaggctccccttaagagtgagaccacggagaccaaatccttgaggcacggtactagtgcagattcaaag

SEQ ID NO: 1938 - DNA, 389 bp, Cyanidium caldarium
  Clone ID: LIB190-038-Q1-E1-B11
gtccgaaagaattataagcggtgcaggattagaagagacgacccgaatcaagttcaactgtacttgcgtgtgtgtattcaatggaataagtaataagtgttgattggccttgtaactttgttgaggtatgtaaacaacccttgatgtccgtcaagaggttgatgaaaaaaatcatgcgcgtcgacagaagtggtaccatctgcgtgttttggtaccgcatatgaagatgccttgctaagctgactctttcatcgtgctagagttgtgctataactttttaaaacttgttttaaccgttgttgagactaagtttgttggctatttgggttttatatatatatatatatatatatatatatatatatagagagagagagagagagagagag

SEQ ID NO: 1939 - DNA, 382 bp, Cyanidium caldarium
  unsure at all n locations
  Clone ID: LIB190-038-Q1-E1-B12
gtccgagactacagaccatccaactagtgcaaatgatgacactcagaatgataatacgatggaaactttggaaggagttgaaaaggaggagccgagaaagacaggagcggaatggcgagtagatgaacctgccaatgcaattttgcgtagaaattatgatcatccgaaaggaacagtttctgtggatagcgagtcacttcgagaagagagaattgccgagtggttggaagagaataccaaatatgagggtcaaggtcgttatcgttgttctcttcctccttttaagctatttcaaggcaaagaatatgttcacaaacatttgaaaaccaaacatacggaagaaatgcanaaagtgatagagaaagcagacaaggaacaattt

SEQ ID NO: 1940 - DNA, 321 bp, Cyanidium caldarium
  Clone ID: LIB190-038-Q1-E1-B2
agttccaaaggaacaagggtttatctctttctggagagggaacatggcaaacgtcatccgttactttcctacgcaggcccttaactttgctttcaaggacaagtacaaggccatattcttggagggagttgacaagaataagcagttttggaggtatttcgttggcaatcttgctgcagggggtgcagctggtgggacttccttatttgtagtgtatcctctggactttgcccgtactcgacttgccgcagatattgggagaggcgaaggtcgtctctacactggcttaattgattgttgtatcaaaaccgcgaaatctga

SEQ ID NO: 1941 - DNA, 357 bp, Cyanidium caldarium
  Clone ID: LIB190-038-Q1-E1-B4
accacacgtccgcttccgacgaagagggtatttggatatttggctatgggtctcttatatggaaagccgaatttccttatgtacggacagtgaaaggttgcgtgaaaggctggtgtagaaggttttggcaaggttcgatagaccatcgaggaactcaagatgctccaggaagagttgttaccttggtccctgctgagaagattcgagcaatgggacaagcatacccgaacgagtcttttgttacttggggtgtaggctaccaaattgagcaagcacaagttgaaaaagttttgcagtacttggactatagagaaaagaatggttattcaaaaattccggttgctaaatatgaacaac

SEQ ID NO: 1942 - DNA, 464 bp, Cyanidium caldarium
  Clone ID: LIB190-038-Q1-E1-B6
ggtataggtctagaagtccgggtcgacccacaagtccacccacgcgtccggtaagaacaaggaaccttaactgaaagcttgaaaacgattgtactgtagagctgttctattcatggtgttatttcaccttctaattgtgtatatctccaaagatgggagcaaagtctagacttttgaaacgaaatcaattgttcataattttgcatacttgttcaaagcattgcaacattaggagaacttcatttggtcatggtcacgatgatattgctcactagacaaggaaatacatcacatcgcacgaattgaccacatgacattgtcgctactgttgtataggttgagttatgtggaatattttgactttgttattttgttggacgcaactggctgtcgctcttttccttatgtacatatacaagcattctcagactgcctgaaaaagtttttactcgtcatgggtccct

SEQ ID NO: 1943 - DNA, 296 bp, Cyanidium caldarium
  unsure at all n locations
  Clone ID: LIB190-038-Q1-E1-B9
gagacattcctcttcatcatagacatttcgaatgcctccaaagctatataagtagcgtatgcaagaaagaaaaaggtaaaggaagaaaggaaaacagagatggactatgagcgagaaggtggatagtcgagaaggaaaaagcccagaagccaagataaggtatcaaagtaaagaaagaaggaaaaggagaagaagagaaggtaggcttanaagcagcanaccagagaagaaagcgttaaagcatgaaagaaaagaaatccgaaaaagaagagaaaaaggtaagaaagaggaccgaa

SEQ ID NO: 1944 - DNA, 399 bp, Cyanidium caldarium
  unsure at all n locations
  Clone ID: LIB190-038-Q1-E1-C10
tccgatgtgaaactgcagtaaactagcagtaggacggaaagaccccataattcttgactagataggtttagggaggagagagaatcatgaagtagaggaggtggggtaagagatgaaagaccactgcatgaggataaggaatctaactgagtaaggaaaataagcttaagctagtttggctggggaagtaaagcctaagaaagagtaaattaggcaagcaaaggcatgagagaagtataatagcagaagcatgcttgaagaaaaagaaagagatttcagaaagggaagaaaagtcagctatagagaacaggtgaaggagaactcgaaaagaagagaaaagccgtactgaagaccgacacaggtactcgangagaaaggagacccaaattaaggtgagag

SEQ ID NO: 1945 - DNA, 348 bp, Cyanidium caldarium
  Clone ID: LIB190-038-Q1-E1-C11
ggaatgtttggcatgcaacacgtccgtgtacattcaacatcatcaaatgccaaagggaggaaagaaagattcttcaaagaaagaagccacaagtaaacctgcagcagcagatgctacaaagacgacagaaaagtctggtccggaagccaagttgaagggaactggtgcaaagaaacaataaaaagttgactatgcatgtgcagtcctgttatgttttgtgagttctgtttgatagtttccagctattcttttggtagtgaataaagagaaaattttttatatttaaaaaaaaaaaaaaaaaagaaaaaaaaaaaaaaaagaaagaaacaataaagagaaaagagggaa

SEQ ID NO: 1946 - DNA, 285 bp, Cyanidium caldarium
  unsure at all n locations
  Clone ID: LIB190-038-Q1-E1-C12
gtccgattcttcagtccaacagagttcgattggaacaagaggactaggtaatgagttttcgcaagttaccgtgcagaaagtcncaagtcatatttcacgctctaatagaaattgtatggaaaagtttcgattttcgggacgtgaatagaagaaaatgaggcaagaaaggagatagaatagcaagcgttatgtatagaatgcaattttgcattgagcgagcaagctttcaacccttcttagcctcncgagtactttttaattcataaatatttaatttttttccac

SEQ ID NO: 1947 - DNA, 432 bp, Cyanidium caldarium
  Clone ID: LIB190-038-Q1-E1-C3
ggtcgagcacgcgtccaggcagagaggcatgggatttgcagagttcgaacgctcttatgagaagtatacaggaggtgatccatcgagaatgaaagtgtccgtggagaaactagacgaagagccacacgacgatcatagaggttccacttcataaaagagactattgtgcacatttgtatattcctttgcgccgttgtttgagagacaactattttttgccgtggtcttgtgaggaagagaaggaggcgtataaccggtgccaaagaaaagagagaagaagaagagaacgactctataagaaaatcaaggaagaggcctccaaagtatcggcgacggaagaacaagatgaataatatcgtgttggtgcgtcgtctttgtgttggaacaataataactcctcaaatagtaaacaacttgatttgattttcaagt

SEQ ID NO: 1948 - DNA, 340 bp, Cyanidium caldarium
  Clone ID: LIB190-038-Q1-E1-C9
tccaaacatccgagccacgcatccggtacaatgtaaaaatgcacatacgggaaagcatcataaaaaaaaaaaaaaaggaaaaaactgaagtatcaggaaaaaaagagggagtagatgaggaaagaaagatcaacgaagtaagagtaagagaacgagtaatgtgaatgaaagcacgaaagtatttgaagaagagagtgtaaagcgcgtaccttttgcataatgtcccagcgagtgaaagaggaagcaaaaagaaagaaaaagaagtagccaggtaagacccgaagctagttgatcttatgctgtccaagcgaagtaaggctgaaccagtatctgtggaaaa

SEQ ID NO: 1949 - DNA, 419 bp, Cyanidium caldarium
  unsure at all n locations
  Clone ID: LIB190-038-Q1-E1-D10
cgtccgatctttgagtangatactatatatgcttgtggaagaatctagagcaaagtggcattggaaacctagaggaggaagtagcagcgttcattctgtgtcatttcacaaatagcaggtcttcaattttttaaacacatccctactattaggaacgaaatgaacgcgtggaactttctgaaggaaactcgagaaggactacaactgttgtccaagtcattcagtggcacacgtgaaatagtaaagtttcgatgcgaatgaaaataggttctagttctcgatgtggagcaaatgcctcgttctataccagaaaacatggatatctctagagtctgaaagggattatctggtgtccaggaggcggttttcaacgaggtgtacattccacagtcctcgtccgcttctagaaacgagcaatc

SEQ ID NO: 1950 - DNA, 362 bp, Cyanidium caldarium
  Clone ID: LIB190-038-Q1-E1-D11
acatccgaatggtgttaccaaatgtaaaacttgcaacggccaaggagttcgagtacagataagacagattggaccgggaatggtgcagcaaatgcagtctgtgtgtcctgactgtagtggaagtggagaatctatcaaggagaaagataaatgtaccaagtgtaagggtcaaaaagttgtgaaagaaagaaaggtattggaagtttatgtggagcctggaacagagcacggccaaaagttggtattttctggggaagcagatgaggagccaggaacggttcctggagatgtgattgtagtaattcagcagaaagaacatgagatattcaagcgaaaaggaagtaatttaatcatggaaaaag

SEQ ID NO: 1951 - DNA, 370 bp, Cyanidium caldarium
  Clone ID: LIB190-038-Q1-E1-D12
caacgataatcgaggagcagcatacagaccgagaaaatggccaatacaaggaacacttggaatatgtggttacctcaaggtggactcaaaacaagttgcaagatagtgaaccttgagttgtgcgggaaaacccatgggtagacagtagaacaagtatgtatcttgcttcatatatcgttacaggacggtggaatgtgggttggtgtctcgtccaacaagaggcacttggcaacaagaattggggtacttgcagtagaaaaggtccccttggaagaaaactagatagtagattttataaataatctcattcccattggaaaaaaatgttgtgatacacaagttgtaaaagtaaaacgtttacttgagatac

SEQ ID NO: 1952 - DNA, 407 bp, Cyanidium caldarium
  unsure at all n locations
  Clone ID: LIB190-038-Q1-E1-D4
cgggtcgagcacgcgtccaagagaatcgtcatgcttcggatctcaacgaggatacttgtcactacagaacggatagtagagtacccgaaaatgtcatagttcgaaaagatacaaacgtgtcttttttggatttgtgtctttttgcctttgatcttttgattagtcgtcttagacacttttcggagccttcttgtccagcttccataccagacacggatgactatgcactttttgtgacgtggaataagaaaggtagagaaggtgagcgtgcacagttgcgaggttgtatangaacgctttcacctttgaaccttcgaaaagggatacatacttatactctagcaaggtaagtgactccgaactgaaactatgaaagggagctcaaaagctgcaagtgctttcagaga

SEQ ID NO: 1953 - DNA, 432 bp, Cyanidium caldarium
  Clone ID: LIB190-038-Q1-E1-D7
acgttcgggtacatcgctgtcgtcatgcagccatatttggcactatcatcgcaattctttgtcaattctctggaatcaattctatcaattattatatggcaactctgatgcatgaagttggatttagtcgagtgcatgcagtatattcaagtatgattggtagtggaactttattgttgtttaccattcctgccatttacttgatggacagaatgggaagaagagtgctgtggttaagtttattaccaggagtgctcgttggatgtttcattataggctttagtttccgagctagcaacatccatgtcgaagaaggaatttacatttggggtatcataacatattatatgttttggggttctggtatgggaccttatgcttgggtactgggatcggaaatatatccaacttatattcgaagtgaaggaatgg

SEQ ID NO: 1954 - DNA, 433 bp, Cyanidium caldarium
  Clone ID: LIB190-038-Q1-E1-D8
cccacgcgtccgaaggcatatggtgcgggcttgctgtcatcttttggcgaattgcaatatgcgttgagtaaggaacctcagttgttaccatgggatccctttgtcgcatccaaacaaccctatcctatcacccaatatcagccagtgtattttgttgccgatagtttttcttccgcaacggacaagtttctcaagtttgcggaaacgatagccagaccgttttccgtttggtacaatccttactgccaaaccatcgaaattattgactcgttggaaaagattatgaaaatagctggacataccaaacaatcgtgttcgttggtgacggaagctttgagaagattggtggaaagttaaaggtaacgtattagattaagcaaaaatagaaaggatttggtggttgtgagtgttcatgcatgatggtttgtgatgt

SEQ ID NO: 1955 - DNA, 336 bp, Cyanidium caldarium
  Clone ID: LIB190-038-Q1-E1-D9
tgcaggcgcgtgggctgacgcgtgggggaaattgcatgaagatgaacaagatatggttgggttgttggttgaccttgtgtgttgttgtcctggtgcaagcaagtagcagttgttcttccacaaggttcgactctgctaatttgccttgtcaactttgtgcggcaatacaccacatacaaatagctactgattgccgaagtaaatggactaaccctgtgactggtcataatcggagtaaacacttgcaagattgttgttcagagagtctatgtgatgtacaagatataaaatatgtgaagattaaattggtggctccacccaaacagttccttttgt

SEQ ID NO: 1956 - DNA, 385 bp, Cyanidium caldarium
  Clone ID: LIB190-038-Q1-E1-E12
tccaagcgtccaggattggatcccctgagccgccgcttggggtccgttagttgcagatttgggtcaaaatataaatcaacttgtgataaatgtttttggaaattatgtcgttcaaaaattgttggaatatggtgatgagaatattcgtcaattgttgacaaagaagttggaaggacacatgctttcattgagtttgcacatgtatggctgtcgagtagttcaaaaagccttggaagtattgaaagggaaggaacgaaccatgttggtgcaagaattgaatggacatgtgcttcaatgtattcgtgatcagaacgggaatcatgtgattcaaaagtgtattgaattggttgaaccagagagcattttatttatcgtcgaatccgtc

SEQ ID NO: 1957 - DNA, 425 bp, Cyanidium caldarium
  unsure at all n locations
  Clone ID: LIB190-038-Q1-E1-E6
acccacgcgtccgcccacgcgtccgacagaaacagccaaaatatttgctggtgtggatgttacgaaagaacctattcctgttcttcctacagtacattataatatgggaggtataccaaccaactggaaaggacaagttgtgacgttaaaagatggaaatccaaatagtgttgttcccggtttatatgccgctggagaagctgcttgtgcttcggttcacggtgcaaatagattaggagctaattctttgctggatattgttgtctttggaagagcctgtgctcgaacagttgcagaattatataagcctgaacaaaaacaacctcctttaccggcagatgctggagaagaatctatagctagattggacanatatcgacatgcaaatggaagccttanaacaagttgaaatcgtctgcacatgc

SEQ ID NO: 1958 - DNA, 412 bp, Cyanidium caldarium
  Clone ID: LIB190-038-Q1-E1-E7
atgaaaaagaaaagttgtttgaggaccaaacagagtgacaagaagagatggcaaggagaatattgggtgcttatatgggagatgccacagtggcaactctgttcagtatcaaaattttgttctatcttactatcatgggtttctccataactatcttggctctcatgggaaagaactcggatggtatttggatacatagtgtgccacctgcagatcaatattgtgcatacaagtcttcattggaggtgaaccaccatggaattgcttcctattgcaagtatatcgttgccgtagctgctattgggttggttatctcgtttttccagttttgctacggtctgttgggtatctttttcaagtggcaacaaaagttgtggtatattgaagatgctttcaatctatttttctgggc

SEQ ID NO: 1959 - DNA, 289 bp, Cyanidium caldarium
  Clone ID: LIB190-038-Q1-E1-E8
aatgcattcaacatattactcactttgatgttcgttcgacgagatgaaagattagtacaagcaacagtatttccggtatttgtttttctctcaaacgcgaagagtttcttggttcctcaaatgattctttaatgacctgttaacgactaaatgatttttcacgaggttgcaaatataatggtcatcataatcaatccagtctgctatacaggaccttttattcagatcgttcacatattactagtggctctgaagataaagcggtatatatatttgccatgtccacatt

SEQ ID NO: 1960 - DNA, 243 bp, Cyanidium caldarium
  Clone ID: LIB190-038-Q1-E1-E9
tccgatcgtacagttgtcgatcgttccactggtacgtaccatttattgagtgatcctagcgatccgttcaatccggtagttctcagtatggatatgttggaaccacaagaagacatgataggaacgattgattagtatattgcatctaaaaggaagaatgaatagaacacaccactattttattcttaaaaaaaaaaaactattgtcaataattttcaacgctactgtaaaaaaactcatgac

SEQ ID NO: 1961 - DNA, 372 bp, Cyanidium caldarium
  unsure at all n locations
  Clone ID: LIB190-038-Q1-E1-F10
tctaggtggtttgcgagcgaagaaaaccaagcgattggtggagactgcaaaggaaaccagctcgcctggttatgagttgttgaagagtttagaactaaggctgcaaacaattgtatttagaacaggctattgtaagagtatgagagctgcccgtcaactagtttctcacggacacgtacgaatcaacggtgaccgtgtggttcaaccaagctatcgtgtaaaagaaggagaattcattaccatcgatccacatataggaatctgtaggttacctttcattccactcttcgacccggaggctacaaagtttaagaaaccagaagattgtgatgtttatataagtccccctatcttctcgtacnaccaaaatat

SEQ ID NO: 1962 - DNA, 327 bp, Cyanidium caldarium
  Clone ID: LIB190-038-Q1-E1-F3
cggtcgagcacgcgtccgagatttagccaacggcgtcgtcgtttcccatgccaaaagacaaaaaagaagtggacaaggcaaaaaaagcagctacggctgtaaagtctggattgaagaaaaagaaaggtcataagataagaacaaaggtccacttccaccgaccgctcactttgagattgccgagacaaccaaaatatcctcgcaagtcttttcccaaaaaaccagctttagatcaattcaaaattattcgatatcctttaacaacagagtctgctatgaagaaaattgaagatcacaatactttggttttcttatgcgacgtgagag

SEQ ID NO: 1963 - DNA, 330 bp, Cyanidium caldarium
  unsure at all n locations
  Clone ID: LIB190-038-Q1-E1-F5
agccataacagagttagatactctttcggaagagagttacaaggactctactctcattatgcagttgttacgtgataatcttaccttgtggacttcagatatgggcggtgaagaagatggaaacgcaacgaaaccagacggaaaagttgaaccagacccgaacaaaaaggagtgatagataaaagcatgtgcgatatgtgtgtttttggttttcgactcgcacattgcttttgcacgataagaagaaagaaagagagatagttgaatatgcangacagatgaatttgttttaagacgacacaacctgtttggcaataaaaaaaaagtgat

SEQ ID NO: 1964 - DNA, 380 bp, Cyanidium caldarium
  Clone ID: LIB190-038-Q1-E1-F6
acggacgcgtgggttcaaagcaacttatcttcaatagtaatgacgccacaagggacgataagcttgtcttatacagacaagtgctcttggaaaattcgaccagtttacttcaaatgtctttccatcaacttttgttcaggtctatgtggaagagaaaagagagaacactgtatttgaaagctgacctagtacaactggtgcatcttgccgagttgaggtgaacaattcaaatgaaatgaatagtctcaagtaccggaataggttcacaaggtaattttttagcagtcacttggtttcgtgacagtggaaaaccgcagtgaaaagtttgttgatcaatacggcgaaaggtataacaacggaaatttcttaacgagaaacat

SEQ ID NO: 1965 - DNA, 324 bp, Cyanidium caldarium
  Clone ID: LIB190-038-Q1-E1-G1
aaacagatgtatgattcaggcaatgaactgacgcattatatcatataataacacatgcaagtaggtaaagcgaacgggtgattaaatacgtgttacataatgcgagaccatcaaagcatagaacaatgtaacaaatggttacagtaaaaaccatagacgaagtatacgcgggaatctcacatgaggaaagccacattgggactgacaaatggtccaaataagataagtcagcactggggaaaattcggcactgtactcgaaagtatgacccagtaatgacgattgtattaaacagaatacgcagtaaaatgatgtaatcaacgg

SEQ ID NO: 1966 - DNA, 414 bp, Cyanidium caldarium
  Clone ID: LIB190-038-Q1-E1-G10
gtccaagcgtccaagcagatctgtgagcatcggctgaagcatctctggaagcttacaaggcagcaagtgagatagcttccaccgaattggctccaacgcaccccatccgactcggtttagctctgaacttttctgtcttttattatgaaattatgaattctccggatcgtgcttgtcagttggcaaaacaggctttcgatgatgccataacagagttagatactctttcggaagagagttacaaggactctactctcattatgcagttgttacgtgataatcttaccttgtggacttcagatatgggcggtgaagaagatggaaacgcaacgaaaccagacggaaaagttgaaccagacccgaacaaaaaggagtgatagataaaagcatgtgcgatatgtgtgtttttggttt

SEQ ID NO: 1967 - DNA, 422 bp, Cyanidium caldarium
  unsure at all n locations
  Clone ID: LIB190-038-Q1-E1-G11
gtccgaccacgcatccgatggtgtataaccagcaaatatgatcagaacaacgaaaaacatcgccaagtaaagttcaatattgaagaaggaaatggtcttccggatacggctactacggaggaagttttagaagggttgaaggatgcaggctttgaattgatcgatgcctacgatttggccgaatatctggaaactccttggtatgctccacttagtgccagtttttcgtggaatggtttccgtcatacccgattaggacattatgtaacacatatttctgtgcggtttcttgaaaagttgggtattattcctaaaggctcatctcaagtcagcaagttgttgatgaatgcagctcgtgaccttgtggaaggaggtaaattangcatttatactccgatgtanctttttgtggcaagaaagcc

SEQ ID NO: 1968 - DNA, 359 bp, Cyanidium caldarium
  unsure at all n locations
  Clone ID: LIB190-038-Q1-E1-G12
tgagaagtatacaggaggtgatccatcgagaatgaaagtgtccgtggagaaactagacgaagagcaggttccacttcataaaagagactattgtgcacatttgtatattcctttgcgccgttgtttgagagacaactattttttgccgtggtcttgtgaggaagagaaggaggcgtataaccggtgccaaagaaaagagagaagaagaagagaacgactctataagaaaatcaaggaagaggcctccaaagtatcggcgacggaagaacaagatgaataatatcgtgttggtgcgtcgtcnttgtgttggaacaataataactcctcaaatagttaacaacctgagttgaatttcaagt

SEQ ID NO: 1969 - DNA, 441 bp, Cyanidium caldarium
  unsure at all n locations
  Clone ID: LIB190-038-Q1-E1-G3
gcgtccaaccacacgtccgcccacgcgtccggatttggccaacggcgtcgtcgtttcccatgccaaaagacaaaaaagaagtggacaaggcaaaaaaagcagctacggctgtaaagtctggattgaagaaaaagaaaggtcataagataagaacaaaggtccacttccaccgaccgctcactttgagattgccgagacaaccaaaatatcctcgcaagtcttttcccaaaaaaccagctttagatcaattcaaaattattcgatatcctttaacaacagagtctgctatgaagaanattgaagatcacaatactttggttttcttatgcgacgtgagagcttccaagccacaaatacgcgacgcggtaaagaaaatgtacaacattgtggcagaaaaggtgaacaccttaatgaggccggacggacagaaaaagcttatgt

SEQ ID NO: 1970 - DNA, 383 bp, Cyanidium caldarium
  unsure at all n locations
  Clone ID: LIB190-038-Q1-E1-G9
gtccgagtttttagtaaaagttttcattcagcatggctcctaaaggtgctaaaagtgtacccgttgcaggtaaaaagccggtggcaaaagttgaaaggaagaaatcaaagaagaagatcggagacgtattccatttatatatacaaggttctgaagcaagttcatcctgacaccggaatatccgcaaaggctatgagcatcatgaattcctttgtgaatgatatttttgagagaattgcgtcagaagctagcaaattagctgcttattcgaaaagcaagacgcttacttcgagagaggtacaaactgccgttcgtcttttgttaccaggagaacttgcaaaacacgctgtatcggaaaggtacaaagcagttacanaatacac

SEQ ID NO: 1971 - DNA, 393 bp, Cyanidium caldarium
  Clone ID: LIB190-038-Q1-E1-H10
aacacaaatatgagtatatttgcaccatcgatcctcattaggacgctgtgatgcgcaagagaagaaagatgagacagcgttccaagtaacggaagaattcctcggacgtctgagttgaatagagttcctaaaacgtggaaaaactctttttgcaactctggcgcagtgagtataccctgctacggaaggttggaagtgtttccgaggattgttcgcaagttatgataaaaggttcttgtggttaaaaaaaaaaaaaaaaaaaaaaaaaaaaaaaaaaaaaaaaaaaaaaataaaaaaaaaaaaaaaaaaaaaaaaaaaatataaaaaaaaataaaaaaaaaaaaaaataaaaaaaaaaaaaataaaaaaaaaaaaaaggggggcccccccaaa

SEQ ID NO: 1972 - DNA, 404 bp, Cyanidium caldarium
  Clone ID: LIB190-038-Q1-E1-H5
agcagcatgagcagttggaagtattatggcaaaacataaaggcaacaatttttcccgtcgaaaatacttcaactattccttgtggatggttgaatccatacaatctttctacacctataggaacaaagagtttgggagttcagaaacaagcttcttgttccagcgaaactacttgtgaacgtagacgttacagtatagaaaacttgttggagctttctagtcgtccttatccaaaccttccagcgcataaaactaagaaacgaaaaagagaaatagaggaagaagagaaacagtttacattaccagactcagatgtgcgtaattgacgatattgtcgtaaaaggaaagaatagctctctcacctttgaagatatgtttctttgcgatgcgctaattgctggtct

SEQ ID NO: 1973 - DNA, 451 bp, Cyanidium caldarium
  Clone ID: LIB190-038-Q1-E1-H6
cccgggtcgacccacaagtccatccgctgtcaacgagctgtttctctgggtatcaatctggcgtcgttaaccaaaatattaaagtgtgcaggaaatgatgacagtataacgctaagagcagacgacaagggagataaggcggagtttgtgtttgaaagtcaaacgcaagaccgtctttctgagtttgaactgaaactgatggacatcgattcagagcatttgggtattcctgacacaaagtacagtgcagtcgttgaaatgccttcttcagaatacagacgtatctgttccgacctaggggtgatgggtgataccgtgaggatatccgtctccaaagaaagtgtcaagtttcaagtggatggtgatattggcaagggaagtgtctgtctacatccatcttctgtggttgataagcctacagaagttgtgaaaatttccttggaagaacctg

SEQ ID NO: 1974 - DNA, 370 bp, Cyanidium caldarium
  unsure at all n locations
  Clone ID: LIB190-038-Q1-E1-H8
acccacgcgtccggaaacatgaaaagattgtcatangaaagtggagcaaagactttttcagacatttgagggttatgcctcctcctcctcctcctcctcaatcctctatatcgacgaccattactggaaaagctatttgtagttatgtttctgcgctattagaagaaagagatcgcgtantgaatgctattcgaaagcattaagttcctagttgtatgtttacagaggagaatgattcataaacggtttccagcaaagagctatcaatttaacttggagttatgatgcctttgttactgcggtttggtcgagagaagatgttcacaggttgtttcctaaatattgtgaacctccttctccacctctacct

SEQ ID NO: 1975 - DNA, 405 bp, Cyanidium caldarium
  unsure at all n locations
  Clone ID: LIB190-039-Q1-E1-A1
accacgcgtccggttttcgacctccgaataaatttcggttttggcgccttgtcccgaatgtctctcggttcaaagtcttttgatcctctcatacaaataagaatcgacttgactctctccggaagaaggttcgtcgacactttcttatggaatatagaagaatgggaggattctatgcgagcgttcgcaagaactatagtagtagatacttctttgcctcactcggcggaggagcaaattgtttcaagcataaaagaacaagtggcgggttacattccctatcgttctcaagaagaaganacaggagaaagaagacacattttaaagctagacattcgtatagggaaagtagtactaagagaccagttcgaaatgggacgaagcaatgccgataactctcctgaa

SEQ ID NO: 1976 - DNA, 406 bp, Cyanidium caldarium
  Clone ID: LIB190-039-Q1-E1-A11
gacccaaacgtccggtagctttaagtatgttcaataccgatgaatcgataagaggatttgcaaagtcttgtttcgaatttgcagctgctaggaaactgcccttgttcctttccacgaaaaataccattttgaaaacgtacgatggaagatttatggaaatattcgaccaagttcgtagggaatatcctcatgttgcttatgaacaccgcctcatcgatgatatggtagcgcaggcattaaagtcgagtggaaactttgtgtgggcttgcaagaattatgatggagatgtacaaagtgatatcattgcacaaggtttcggaagcttgggaatgatgacgagtattctcatggcgccagatggcaagacggtggagtcggaggctgcgcacggtacgggttacagaca

SEQ ID NO: 1977 - DNA, 410 bp, Cyanidium caldarium
  Clone ID: LIB190-039-Q1-E1-A2
atacatatccttgtttttattggtatttagtacagtgtcttggacggtgttttatcgctatttacaaggttcgaccacagaggactcgttcataaataacgatagcgagctgtattcgatagtcgaacaggaaacttttgatgaagcaacacattcacgtgctacggatcacacagcgcattctccagcagttggtccacaaacaagtacagctgtgccatcggatgccaaacaacaacttcatggagacaacttggtatcgccacctacgaatacagaaataggaatggaagatacttggaataacacgtctcgttatatgtctattttatactatagctggataagatggcgtcatttattgcattcctgtcgacattgggctactcctccctcgattgccatcgtat

SEQ ID NO: 1978 - DNA, 416 bp, Cyanidium caldarium
  Clone ID: LIB190-039-Q1-E1-A3
gcaaggagatcaaaagttattacaaagacttgtacaacataaagtagtttgtgaaagtgacttgataaaatggtttcaccaattcgtattgcaatccgcacgtggaaataacaacaacaaccagacaggtctcacagaacagttgaaagctcgcttggtccaatacaaagcaaaactgcagttgttacgtttgtcgctaaatagtatatgggtacaagaaaagaatacttcttattggtcgattgtcaatgcacgagatgacagaattgcgcaaaaagtgtgcaaatatagcgatacagatattttggttttcaaaacgatggtggattatgtattgcaagaaaagaatagtcccacggagctgatagataagcgtgagttgttatcgtcgttggatagtctcaaggaaaagagac

SEQ ID NO: 1979 - DNA, 361 bp, Cyanidium caldarium
  Clone ID: LIB190-039-Q1-E1-A5
cccacgcgtccacccacgcgtccggcttaaaattgagggtctttgactggattgaagtcaaccatgtcagtaacgctacttaaccctggtgcggaaataagcaaacgcggagtcgcgttgtacactactattaacgctgcgaaaggactacaagatgtgctacgttcgaatcttggcccaaagggaactctcaagatgctcgtttcgggtgcaggagatattaagcttacaaaagatgggaaaattctactggaagaaatgcaaatccagaaccctacagcttccttaattgcacgaacggccactgcccaggacgacatggtccgagacggtacgacaacttgtgtcatactgactggtg

SEQ ID NO: 1980 - DNA, 291 bp, Cyanidium caldarium
  Clone ID: LIB190-039-Q1-E1-A6
accacgcgtccggccacgcgtccgcgcacgcgtccgcccacgcgtccgcagaagaagtcaacagtgtgcctcgtggatagaaataaactttatcttattatgctcaatgtacactactaataacactgaaaggcagactacacgaatgtgctaagttcgaatcttgggtgaatgggaagtcacaagatgctcgattcggctgcaagagacatttcactgacagtcgatgtgaagcttctactgtgagaaatgcctgtcgataaccctacagcttccttagttgcacatcgg

SEQ ID NO: 1981 - DNA, 435 bp, Cyanidium caldarium
  Clone ID: LIB190-039-Q1-E1-A7
aggaggattctgtgacgtatcctagaggcatcacggccagaggatataactcagttatatgaagttcttagacatcgagtgcctaagcgagctccaaaggaagcttaatgacctcgaattaacggactatcgtgttcgttgtcaattggaagcttattcctgtaaacccgcaggttttgacaaaaaattgagcaaatcgttggagcaaaggttgttggaacaacttgaagcttctccaagggcattccaagcgtctcccgtgggctctttagaagaccaaagtgcccgcaagacattaatcaacctcatttgcacactgaacgctgcgcaccaggattacgactttagctcgctgcagctttcaagactgaaacgtgtccaagatgtacacgcacttcagcagcacgtcgactcgctgtttgagcgcttttacag

SEQ ID NO: 1982 - DNA, 418 bp, Cyanidium caldarium
  Clone ID: LIB190-039-Q1-E1-A8
agagattttgtggttcaatggcttttgttgcaactagtgtgatcatacccacaaagtgtcgtttacaaaagaaagtatcacatattccctcgtattgtgtgaggatgagttgggttgcaactttaaaatcttccaaaatagaaggctcctctgctattccagaaggtgaacagcctgacctccatacaaagtgggagcagtgtttacaagagaaagggtcaccagagtgccaacagtgtcaaggttcaagacaaataccatgtcctgcatgtgaaggaaagggttatttcgtgatggaagttttcaatgttacctctagtaaccagtgtcaagtttgccgtggacaccgtaaaactccttgcccaacttgtaaagaatacatttatcgggcagtaaaagatttatgatataaagtata

SEQ ID NO: 1983 - DNA, 401 bp, Cyanidium caldarium
  unsure at all n locations
  Clone ID: LIB190-039-Q1-E1-A9
cgtccacccacgcgtccgcccacgcgtccggggaagttatggcaaaaacacgtgccagcagcagcggtaaaacgtgtgtagcaagcgtagagcagaagaactgggtgtaaaggtcgagtagtagagtaagtgtaaaagggaaaggaaaggagagaaagaggaaagggatgaaatgcagagatctctagagaaaggcaagaaagaaaagaaaggaagacacagtaaatgaggcgagaaagcataggaagtgaaacggattaggaacccgtgtagtctatgcagtaaaagaaagaatgagtaagaaaaaagggagtcattccaccaggggagtaaaggcgcaagaaagaaacccaaagcaattgacgggaatcggaaaanagggtggatcacgtaaattaatc

SEQ ID NO: 1984 - DNA, 392 bp, Cyanidium caldarium
  Clone ID: LIB190-039-Q1-E1-B11
accgtttgcacgtagttgatcaccgagaagaagacgattcggaggaccgtatatggagggaagaagaagctgaggaagttccaaaataccaagttccagaagagagctacgcacagagagaagttagtggaagaaagtttcgagaagaaatgcttcaagccaaagcttcacactctaccaacatagaactccatgttggcgatagatgctttgttgcgcctaataaccgtgttgcaacagttcgttacgtcggaaagcttcctgttcatgaagctgaaacagtgtttgttggagtccagtttgacgaacctgtaggaaagaatgatggcagttatcaaggacattactattttcactgcgaaccaggatatggaagttttgtccctttgaaa

SEQ ID NO: 1985 - DNA, 164 bp, Cyanidium caldarium
  Clone ID: LIB190-039-Q1-E1-B4
aaatgatgattgctgggttttgtggctcaatagcccaagttagtccttattacaagaaggccttgtgttgtaaaaaagcttgtgtatttagatgctctgctcataaacataacattttgaaatatttggaccatgtttctcccgggaagaaaagaaagcgtttt

SEQ ID NO: 1986 - DNA, 396 bp, Cyanidium caldarium
  Clone ID: LIB190-039-Q1-E1-B5
cccacgcgtccggaattaagtcggatggaatagctaagaatcttgaagaatggaacgaaataaaaatcattcagactcgagttttcaccatgaaagaacagaaacaactgaagagtcgacgtcagtcccgacggaaccttgtatgggagagttgcagcaacttctttcagtgacacttgaaagaagccatttggacataaggaagcttcaacaagcagcgaacgattttcgtttatgcgcaaagacgtttaaaatatgtgatgtgaagttggaacaaagttttctcaaaaagtcaagtgattagacaccctcatggtttttcattgaaataactggttgctcttccttgagggcaactatttattacgaaaatttcgtgcaccttctcttacaata

SEQ ID NO: 1987 - DNA, 358 bp, Cyanidium caldarium
  Clone ID: LIB190-039-Q1-E1-B6
actttattgtgtttcccttgtgtgcgctttaccgtatagtagaaattctaatgttacagagctagatccgcgttcttttgaaaaacaagttttgggctcaccggagaactggtaagggagttggaatagcctaactcacgttcgggcgtgccctaaggaaacaagaataggctcatagagttctatgctccttggtgcggttattgtaaacaacttgagccaatttacgagaaagttgcttcgaaattgaaagatgctgtaagagttggagcagtaaatgcagacaaatatccagagctcgcacaaaggtggtgacggtaccaaaaggttgcacggaaactgcttgtgtggctgaaat

SEQ ID NO: 1988 - DNA, 390 bp, Cyanidium caldarium
  Clone ID: LIB190-039-Q1-E1-B8
acatcaacaaggaaggaaaggacacttatgtcaagttccactgggttcctaagctaggggaacagaatctactcgatgacgaggcacagattgttggaggaaaggatttctctcatgcaactcatgacttgatagaatctattgacgctggtgactaccctgagtatactatgtgtatccaaacaatggatccagccacagaaaatgactatgattttgatcccttagatgataccaagatttggccagaagacatgtttccaaagaggcctgttggacgtcttgtcctaaataagaatgttgacaactttttcttagaaagtgaacagatcgctttctgtccaggtgtgatggtaccaggtatatatgcctctgatgacaaaatgctgc

SEQ ID NO: 1989 - DNA, 210 bp, Cyanidium caldarium
  Clone ID: LIB190-039-Q1-E1-C2
accacgcgtccgcccacgcgtccgcccacgcgtccggagcaaatcgatatgaaaaggcaaaatactccaaatagaaagttctttaccgctgtagtggtcgcactgtatttacatgctgttcactcgacaccaaaagattatatagctgtacatttggcaaactttgttgcttttactatcgtatttatagccaaaatgccttggatgcac

SEQ ID NO: 1990 - DNA, 405 bp, Cyanidium caldarium
  Clone ID: LIB190-039-Q1-E1-D5
cccacgcgtccgcggacgcgtgggcgacgtcgcatttgtagtagtattgtggtgctctttccaaccggtttctccaacgacgcaacacaaaaatgcctcgtggtccaagaaaacatatgaaacgtttggcagcacccaaacattggatgctcagcaaacttggtggtatttgggcacctagacctagcagtggaccgcacaagttgcgagagtcactacctctcttattggttctccgcaatcgactgaaatatgcgctcaataatagagaagcagtggctattttgatgcagcgtttggtaaaagtggatggaaaagtacgcaccgataaaacttttccagcaggtttcatggatgtgattgaattggaacgaaccaatgaaacttttcgtttaatgtacgatg

SEQ ID NO: 1991 - DNA, 362 bp, Cyanidium caldarium
  Clone ID: LIB190-039-Q1-E1-D6
accacgcgtccgcattttggtagcgtacaggttgtggttttcagtttgtatggtttgttcatttgtgcccgtaacgaagcctattactaccaattgtcgtcaaaagaagaaaagtacggttcaatgggggaaaagatggggaacatacgtaccgtcaactagcggttcgttcttacagtgtaacaggtggaataatcacaagcaaaactttcgaccacaaaggcaactcttccattgtgtcttggaagactttagcacgtggatgtgcaacttgaagagttacgtggaagacaatactcggaaaatttggagacaatccaagattgaagggcagcagcacaaagaaagtcaaacgccggaaa

SEQ ID NO: 1992 - DNA, 447 bp, Cyanidium caldarium
  Clone ID: LIB190-039-Q1-E1-D7
gtcgacccacgaatccaaccacgcgtccgcattttggtagcgtacaggttgtggttttcagtttgtatggtttgttcatttgtgcccgtaacgaagcctattactaccaattgtcgtcaaaagaagaaaagtacggttcaatgggggaaaagatggggaacatacgtaccgtcaactagcggttcgttcttacagtgtaacaggtggaataatcacaagcaaaactttcgaccacaaaggcaactcttccattgtgtcttggaagactttagcacgtggatgtgcaacttgaagagttacgtggaagacaatactcggaaaatttggagacaatccaagattgaagggcagcagcaaaaagaaagtcaaacgccggaaaagtcgaccttctatttacagaagcaacttttgaaaggccagttggagagtattttacgggacttgtac

SEQ ID NO: 1993 - DNA, 322 bp, Cyanidium caldarium
  Clone ID: LIB190-039-Q1-E1-D8
aattacaggcaagggaatgcatctcatccgctgttacattgattgtgatttgttgtgctgagcgagaggcaaggtgttatcatggcaaaggcagtgagaattggtgctgaaggttacaggttaaagttggacggtgcagttcaagagatagacggtcgttctgtagttctggtagatgtggatagtattacccctctcatgtttggaggtagtatgaaagaaaaggccaaattgttggatgccaagtttctaaggaagtattatgaggagaacaaggacttcttcttcttgtcgactagagaagagaagaaaatgtttgtga

SEQ ID NO: 1994 - DNA, 345 bp, Cyanidium caldarium
  Clone ID: LIB190-039-Q1-E1-E10
ggtactagtctagaagtccgggccgacccacgagtccgaaaatattcaacaagagttgaacgactttgtggaaaaaacaagagaggaaatggaacaagtaagtaggaatacgagtgttgtaagttttccatcacagactcgtggatatagatggtagagtgtgttgctcaacatatcggtaagaaagaagaacaacaaagagggagctaccatagataggatgtatttatggatatgtttgtgtctagatattgccaataaagcggtgtgtttggataaaaaaaaaaaaaaaaaaaataaaaaaaaaaagaaaaaaaaaaaaaaaaaaacaaaaaaatcaaaaag

SEQ ID NO: 1995 - DNA, 361 bp, Cyanidium caldarium
  Clone ID: LIB190-039-Q1-E1-E3
aattggtttgggattgttgtgtattggtggagttgcaaagaggaaaacatgtcaaagtttgccttgcctgcattgccttatgactacagtgccttggaaccacatatcgacactatgactatgaacgtacatcacaagggccatcaccaaacttatgtcaacaatttgaatggtgccatacaaggggaacatgggggtcagttcaagggtctctccatcgaaaacatccagaggaatgctgcaaaggcacctgatgctatcaaggcaactgtgagaaataatggcggtggtcactacaataattccttgttttggacactaatggcacccacaggatctgcaaatattgcacctcacggtg

SEQ ID NO: 1996 - DNA, 428 bp, Cyanidium caldarium
  Clone ID: LIB190-039-Q1-E1-F1
accacgcgtccgcccacgcgtccgcccacgcgtccggtgggatgaagtacaaacaagcagttttgagtgaaaatgtgattcctcaagaagtgagtgccaacaagttgcgagcctgtatggtttgtggactggtaaagacgtttaaccagtttgtcgtttttggctgcgaaaactgtcctggactgatagacgtgagagttgcagatagagaacgagtagcaaccgttaccacgagtttattttcagggttggtttccattactcgtcctttggatagttgggttgccaagtggcagcgagttgctcgtctcgtacccgggtgttatgcaatagcagtacgagctgctctccccgaagatattgtggaagagttggaagaaaaaggacttcaagtacctcgaacgagagcaacgcagctgcctatgaat

SEQ ID NO: 1997 - DNA, 373 bp, Cyanidium caldarium
  Clone ID: LIB190-039-Q1-E1-F11
acggacgcgtgggcggacgcgtgggcgagcaattcaaggcaaaactgaggcaagactggaaaacggcaatatttgcttcatggaaagtatggccattggcacacgctattaactttcgattcgttcctagcaatcaacgtttactttatatcaacgctgtgcaaatattttacaacgtgtttctttctaatattgggaataagagggccacttgagcaagtaatgggaatatccaaaaaatatatatatatatatatcatgagagagatacgtacttgttgtgtgttggtgggttatagttgttgttgtgtttcattaaagtgaagtttacatatcaaacaaagctaatgataactggtactcctcgaaaagc

SEQ ID NO: 1998 - DNA, 431 bp, Cyanidium caldarium
  Clone ID: LIB190-039-Q1-E1-F2
accacgacgtccgagagcgagttttgggtattttgtgtcctcaagcagtcatgttgggtttcctaccgaccatatcaactagtttccccctacgacaaagtgaaagttgccactgttcccacgtatctaaatacagggttgggcagcgttttgtcgcacgcaactgtcgtcagcctcggcaaggaacaatcttgataatgtcaagcacaagctcttcggacacttggtaacagcagatacaagacagcatcaagaaagcggaagaagcaacgcaaaagtatggaaaaaactcgaaagaagcagctgctgcctgggatgccgtggaagaactggatgcagaagcttctcatcagagagtaaaagaaaagaccgaccctttggaaaagttctgtgatgagtctcaagaagcggacgagtgcagagtatacgat

SEQ ID NO: 1999 - DNA, 413 bp, Cyanidium caldarium
  Clone ID: LIB190-039-Q1-E1-G10
ccgggccgacccacgacgtccgctggaaagtacagtggaaagaatattccagaaggttcccgactgtcactcgagaaatacaaaggattgaaggaagtagcttttacggaacgagagtggcagattgagaagaccgatcagttgaagccacttgctcaagaacttggttgtactgtagctcagttagcgattgcttggtgtgcagcgaatccccatgtatctaccgtgattactggagccacaaagttgcagcaacgagaagagaatttcaaggcaatggatactgttcccaagttgacaccggaagtaatgaaacgaatcgacgacattgcacaaaccaaaccagactacaatccagaaatgaaaatggcacgtcgagtgagaggaatagaaaaggcttgaagatgtaatgt

SEQ ID NO: 2000 - DNA, 417 bp, Cyanidium caldarium
  Clone ID: LIB190-039-Q1-E1-G2
gcgtccaactataacttgttgctacccaacgatcttaataacaatactagcaacgcacgaggatgacaagaaaatgtcggtttttgatcccccatggggaataacatgagtaaccactataataatattgctagatgtagtattgatcaccaactacataactaaatgtgataaatgaacatgtaactatgaataacgctccagattttgtaaattttcttacttttgacaactttcctgattacatgaagtcgtatatagatgtatggcgaaacgtacgaagcatgcgcagctcatcaagtcgaagtcctgtcaaatcgataaaatttgaatgaacttgatagttgaatgtcgacgtatggatggccctatccgtcacaactgtccttatttttgtacaagaacgactcacctatt

SEQ ID NO: 2001 - DNA, 157 bp, Cyanidium caldarium
  Clone ID: LIB190-039-Q1-E1-G4
ctggttgctccgactgctctgagttgcctctttccctctttccttatcggtgccgcaattgcacccgacgtactttcagaggatagatcgggatatgctcagcaaggcctgttgcaacatcagtgccaactactatgttagcagtatgcattctatc

SEQ ID NO: 2002 - DNA, 420 bp, Cyanidium caldarium
  Clone ID: LIB190-039-Q1-E1-H2
gcgtccgaccacacgtccggctgttcagcgccaaactgacgacgtcttccgaaacctcagtttacagcttgtgcaaagaggacaatagcttggtctttcgtagctttttaaagcactcttggtgtgcgctcagtgctattcactattgctttgggtgaccagagagaggtacattcaaacactccatttgttacttttatagagaattacacgcggagcaattctgcacaagcggagaaagggaagaggcaggcattcaagccaacagctactgactcgtcccaggcttagcaaaggaaaaaatcccgacgagtactatacatgtttcgatgcagagtttggttctggctgtattttggatagagaattagaatttgtactcactggcattaatactttacgatgtcacgtgacatatgc

SEQ ID NO: 2003 - DNA, 330 bp, Cyanidium caldarium
  unsure at all n locations
  Clone ID: LIB190-039-Q1-E1-H4
aggaatgaactaaagtcaacgaaaagctccttgagactttgtactggtgtgtttgttcccaanaatagtaattttctgttagatacgaggcacgctcctctagttgggcccggttcctgtgtccacctaagagcgtttcctagaaaactagcagaaattacttccttgagaagtgacgctgctgtgagcgcttctgttacatatggagaagaaaattctccacaactgtccgtttcggaccttgtcgttggagagacgtatactggaacagtgaagaatatcaccaactatggtgcctttgtggatataagagcaaacaaaatgggattg

SEQ ID NO: 2004 - DNA, 447 bp, Cyanidium caldarium
  unsure at all n locations
  Clone ID: LIB190-039-Q1-E1-H6
gacccacgacgtccacgagagagagaggggatgagtaccccagccagacgaagattgataagagactttaagaaactacaacaagaccctcctagtggttgtagtggtgctccttgtgagaatgatattatgcgttggaatgcagtcatcctaggcccagaagatagtatctgggaaggtggcacgtttaaactaacttttcagttcaccgaagactaccctaacaaaccgcctacggtcaagtttgtgtccaaaatgtaccatcccaatatttactcggatggaagtatttgtctggatattttacaaaatcagtggagtcctatctatgatatttcagcgatattgacctccattcagtcgcttttgtgcgacccgaaccccaactcaccggctaattcggaagctgctaggctttatcagganaatagaagagaatacgaccgt

SEQ ID NO: 2005 - DNA, 393 bp, Cyanidium caldarium
  Clone ID: LIB190-039-Q1-E1-H8
ccacccacgcgtccgggctgactatccttctcctgcactatgtctgcgaatattctgaataaagtagccaagtatgccattgttttgggagttgctggtgctgccttgcaatcttcggtattcgttgtacccggtggtcaccgggcagtcgtgtttaatcgtttcacaggagttgaagaacacgtacgtggggaaggaatgcacttgaaaatcccgtgggtacagagacctgtcttatttgatataagaacgaggcctagatcgatcaattcggtgacaggaaccaaggacttgcaaatggtgaacctcgtgctacgtgtgctatccaagcctaacagagatttgttaccacgaatatattctagattaggacaggactgggacgagagagtg

SEQ ID NO: 2006 - DNA, 381 bp, Cyanidium caldarium
  Clone ID: LIB190-040-Q1-E1-A11
agcgattccatgttgaaagagggtacacgtatattgtccgatctcaagtttcaggtgcttcaagatggaaaacctcaggtgataacttcggatcaagtattcggaggaaagaaagtagtattgtttgggttacctggtgcctttactccaacctgctctaggcagcaccttccaggctttggacagaaggttgatgaaatcaaatcgaaaggagtagatacagtcgcttgtttagctgtcaatgacccttttgtattacatcagtgggcagagtcacagggagtggcaggaaaaattctcatgttagcagatggtggtgcgcaatctgtcaagaaacttggactggatatcgatactggtgactttggtggtattcgttgt

SEQ ID NO: 2007 - DNA, 416 bp, Cyanidium caldarium
  Clone ID: LIB190-040-Q1-E1-A4
aactcgtgaaacttacagttggtgtaggattgcctaaagcaaagcgtggagattggcttatggagaaactctcagaaataggcgttgatacagtaatacctattcattatgaacgaacaaattctgaaccttacgaacgtgatagaaaacaacggtggcagaaaatttgtatctccgcttgcaagcagtgttgccgcaatcgcctgatgaagatagaggaagagcaatcctttcaaaatattttatccaagcaacaagtctacaaacactgggatcaagtgtatgtagcttctatggaggcaactcgtccaatgatacttcctccagtaaaaagtgccagtatacttgctttaataggtccagaaggtggattgacacctcaagaagaaaaaatagcttctgatgttggtgcacac

SEQ ID NO: 2008 - DNA, 377 bp, Cyanidium caldarium
  Clone ID: LIB190-040-Q1-E1-A6
cccacgcgtccgaatggagacaaaaaggtataccaatttattcatggcgccaatggaatgtttgtgattacgcacgaaaatcaggctgttctgtagttgctaagacacggtgccacatacgactattcacatccacctacaacattccaacgcagtcaatacacaggtaaagagtatgtatatcaatttcatattaccttgattcttcctcgagaggacaactcatgcattggaataatggaatattgggtattgataactccaattgtaaaaccactacaatccatatcgtcagcaattaccaaaaacaattcctgtgacaaacaaatagaaagtgaatctcaccctcgaccagccatggcactatgtacggctga

SEQ ID NO: 2009 - DNA, 416 bp, Cyanidium caldarium
  Clone ID: LIB190-040-Q1-E1-B1
ccacgcgtcagggtaagaggactcccaaatgttcgaagtggttatagtaaaaacaattgccgacatcagcgctggaatctgtgtcgcaggcatccacacatgggaactgggtgtagtcgacgcataataaatcaacatgtagggaggattgggcagtgtacacggaagtatgggacaatattcaggaatctcgtaagcaaggcaggaaataaaaggaaggaatacacggtagatgaggcaaaaacacatacgaactgcaacggtttaagatctcttgtaatcgatgcactaaaagactgaatgattaagtcaaataggagtcattcctgctagaggaataaaggcacgagagaaaaacgcaaagcatttgatggagatctctctacaggggtggatcacgtgaattaatcggatat

SEQ ID NO: 2010 - DNA, 402 bp, Cyanidium caldarium
  Clone ID: LIB190-040-Q1-E1-B10
acgcgtctagcaagcgtctgatacatatggccagcgctggtcaagatggccttgtgcaagtcaagaagggatatgagtagtagagagattgcaaggagataatattttggatagagcactgtcacaatcaggagatgtatttcagtgcttttgcagcatccagttgttggtgaatgcatacggagctattagaggaaatattacttgtccagaatgtatcgaattgtgtcgtctagtatctggacatatagcggtttggttcgatgaagatttggatgacctacgtttggaaactatcttgggagcactattgtgtacttgttattgtgagtggaagcgttttgaatgagacttgggggtacaagaatggaatgaattggggaagatatcttccgtatatac

SEQ ID NO: 2011 - DNA, 398 bp, Cyanidium caldarium
  Clone ID: LIB190-040-Q1-E1-B12
ataccagtatcgatccagaggtaacgaagtaaataaacgtttgaaaggcttcaattatgaaaggaaaaacaagtgtaccacggtcaattcatcaacctcaagctgtacaacactaactgtgaaaatgcagtaaactagcagtaggacggaaagaacccataattcatgactagataagtttacggaggagagagaatcatgaagtagaggaggtggggtaagagatgagagaccactgcatgaggataaggaatctaactgagtaaggaaaataagcttaagctagtttggctggggaagtaaagcctaagaaagagtaaattacgcaagcaaaggcatgagagaagtataatagcagaagcatgcttgaagaaaaagaaagagatttcacgaaagga

SEQ ID NO: 2012 - DNA, 402 bp, Cyanidium caldarium
  Clone ID: LIB190-040-Q1-E1-B3
gccggcccacgcgtccacccaagcgtccgatctattggtattggtattgcacacacttatcatgaaaactcctcggcatctttgttaacgagaggcattttggatgccatctccggtggaattttaatatacacaggattggtggagttgttgacttattggtttacgcgcaactcgaactttttaagacgcaaagccatatctatttttagtattgtgggatttgtctggttaggagccatctgcatggcgattatcggagcgtgggcctaagaataaaatttgtttgagacgtcgtggtgcagatgactcgcatgtttggtagttggttcaagtttgacaagagaaaacatttgttgctacttcttacaaataaaaaagttcacggacaaattgtagatt

SEQ ID NO: 2013 - DNA, 191 bp, Cyanidium caldarium
  Clone ID: LIB190-040-Q1-E1-B6
tggttcgtcctggcggttggttgcattggcggatagcttcacgccttcactacctcagttactgccgtcgaggacagaactcgtctgtggatgcgaccccaggtgggcgctcccatgctcagctgatcgtacaggagggctcatccgaggtgtcagctcgtctccctcctgcaggttcgcccacaccccct

SEQ ID NO: 2014 - DNA, 392 bp, Cyanidium caldarium
  Clone ID: LIB190-040-Q1-E1-B8
cccacgcgtccgggcaaaagagcgatgcaaagtacgaccaacttgggcgatcgtaccaacgaattcttatcgatagcacaaaactatcaacaaagacaaggaatagaaaaccagaccaaaagaaagggaggaaatggtggcaagtcggcgttcaccaaacaagcgataagtattgcacaaggaatagagtccatttccaagaatttagaaaagctgacaaaagcatgtcagaaaagtagtttatttgacgacggttcttcggaaattcaacaattgacgtttctagtgaaacaacaactacacgaactgaacaaggagttggaagagttggaacgcattcatcgacaacaaagaaatgggtatcataaacaagcaatatcgcacggagagtc

SEQ ID NO: 2015 - DNA, 409 bp, Cyanidium caldarium
  Clone ID: LIB190-040-Q1-E1-B9
ggccgacgcacgcgtccacccacacgtccgagacagatggccaacgctggtcaagatggccttgtgcaagtcaacaaacatagaaaagtaaagagattgcaagaagataatattttgaatagagcactatcacaaccaggagatgtatttctgtgcttttgcaacatccagttgttggtgaatgcagaaagagctattataggaaatattacttgtccagaaagtatcgaattgtgtcgtctattagctggacatatagcggtttggttcgatgaacatttggatgactttcgtttggaagctatcttgggagcactattgtgtacttgttattgtgagtggaagcgttttgaaggagaattgggggtacaagaatggaatgaattggagaagatatcttccttagata

SEQ ID NO: 2016 - DNA, 386 bp, Cyanidium caldarium
  Clone ID: LIB190-040-Q1-E1-C10
acccaagcgtccgcccacgcgtcagcccatgcgtccgaagaacaggcacctttgaatatccagttgacgggataagaatatgaagaagactatgtggaaggcattctatctagatgagagatagtttagatttgtgtactagggtcgtgctatatttaagtgtttatagagatgtgtgtgtgtgtatgcaagtatgatagcactcgaagtctcctttgtccatataaatgagtttcaacgcccagatgtttgatactcatagtctatactgtctattattgtagatctagctgttacggaataatctacggacgtgcatgcataaaacgtgccaggctaattgatgctattttgaacagggacacctgctccactagatccatact

SEQ ID NO: 2017 - DNA, 99 bp, Cyanidium caldarium
  Clone ID: LIB190-040-Q1-E1-C11
cacgcgtccgattgcatagatagatggccggttatttacgacatcgtgtacacgcgcagcttcgtaaaggtctcaacgggcgaattgcgtcgtgtgtgg

SEQ ID NO: 2018 - DNA, 402 bp, Cyanidium caldarium
  unsure at all n locations
  Clone ID: LIB190-040-Q1-E1-C12
gcgtccatgccaaattactgantcntatcaattgtattcgggttgcaatggtggaaacgcttcttatggacttgccatttgtgctgaaagaacagcggtagtaaaggctgtaagtgaaggtcatactcgttttcgagcgatagcaatatctacggatgccgttgggcaagtatggccttgtggtgggtgtagacagtttctatcagagtttggaaactttccagtgattgttatgcaaggaaataaccagctacaagcagaaatgttacatgacttgttacccaaaagcttttccaagtccgatttaaaaacaatttaagtcgtcctcttttggcgcaacgcatttttttgtgtgtttttggaattttccatcgcgttgtgttggtgggaataataaaaact

SEQ ID NO: 2019 - DNA, 420 bp, Cyanidium caldarium
  Clone ID: LIB190-040-Q1-E1-C2
acccacgcgtcaacacaggatcgacattccgtacgttgtttgctgctctcgtatttcatcaattctttgaaggatttgctgtcggtactactgtttccgaagcccagtttggcacttggaccactatagtaatggtactttgctattctttggaaactccaatcggtatatctattggtattggtattgcacacacttatcaggaaaactcctcggcatctttgttatcgagatgcattttggatgccatctccggtggaattttaatatacacatgattggtggaattgttgacttattgagtttacgcgcaactcgaactttttaagacgcagagccatacctatttttagtattgtgggatttgtctggttaagagccatctgcatggcgattatcggagcgtgggcctaagaataa

SEQ ID NO: 2020 - DNA, 248 bp, Cyanidium caldarium
  Clone ID: LIB190-040-Q1-E1-C3
cccacgcgtccgagaatttgttgattatgacaacaaacgaagaatgacttttcgttcgtgtttgactgcttttttcgtcggactgagacatgagttggactgagtcaacgacttttatctcgacatagatgaggagcttaccatatcggatcttattctgaaagttgcaattgacgactacatcttagcactgagagtgagtacgggcgataggagtcacagtggggagaactcagtgatttgcaggg

SEQ ID NO: 2021 - DNA, 420 bp, Cyanidium caldarium
  Clone ID: LIB190-040-Q1-E1-C4
acggacgcgtggggcgtcggttgtgagaagtgtcgattatggggaaaacttcagtttcttggtgtcggaactgcgttgaaaatactatttgatgatcatttgacatttcttcaacacaatgaagtgagctccttgttgaatgtgttgtataagctttctactagtgtggtaactattgcatacatggaacgtctccttgtgttgcaacgtattcgatactggttgttggttgccagttgtatgatgggtgtggctttggtatttatgttgatgtttcgacgttctttttgggagcgtgatgagttgtattacaaggccaaatctgtttaaagtcaatgttgctatttgtatttgaaaatctttttttcattttggaatatgctggtactaggttgttgttgttgtatcgagtgacatgta

SEQ ID NO: 2022 - DNA, 426 bp, Cyanidium caldarium
  Clone ID: LIB190-040-Q1-E1-C5
gacccacgagtcagcccacgcgtccgatttaaattagggcaagagatgtccagcagcagcttctatgactagtcgcgtgtatacttttgatacatccaatagctggtcaccttattgtgcctttgaatggtatagtttcataaccaaaaaagcttatttatgcaagtctttcatttttgaagtgtttggcgtggtcatatcggtggagcgcaagtcggactcgatagagtgtctgttagacgattctttgcagttgaccactttttgttgtcctaaaaaagatacatacggattagaaactatgttgcggttgggtgacaatattcaagtgataggtcacccgatgggttctcaagtgcctaccttgaacgcggttcaagtaacggtgcataaagctcccaactcggaatgcacgtattggcttga

SEQ ID NO: 2023 - DNA, 394 bp, Cyanidium caldarium
  unsure at all n locations
  Clone ID: LIB190-040-Q1-E1-C9
gcgtccacccacacgtccgaccggaaaccagtaattgctgaccgagacacgaaaaaactgagtatcaggtaagaatacatggagtatatcacgaaccacacatgaatgaagtcacactaagagaacgagtagagtgcatttttgcaagattttacttcaagagaacagtgtaatacgcgtcccttatgcatactgtcccancaatctcacagaggcagccgatactgttacaccagctatcccgataccacccgctgctcattgatcataagctgtccctccgacgtcaagctgaaccactatctctggataaccgatttggaaggataaccataacgggtgaaaggccaatcagtgctattgagaccaggtacacctccagagctacaaccat

SEQ ID NO: 2024 - DNA, 266 bp, Cyanidium caldarium
  Clone ID: LIB190-040-Q1-E1-D12
tggaccgtgaaagagctcgtgtttttcgttcgactggtactggctcgcttcgaaaccatgaccctttcctcatgttggatgagttccgtgtccatgcatcagcatgttttcctgaccatccacatcgagggtttgagactgtcacttatatgtttgacggttattttaagcatcaggataatcatcgatactcgggagttatagggccaggtgatgttcaattgatgactgcacgtacaggaatacttcacagcgaaatgcctcaa

SEQ ID NO: 2025 - DNA, 347 bp, Cyanidium caldarium
  Clone ID: LIB190-040-Q1-E1-D4
acccacgcgtccgcccacgcgtccgcccacgcgtccgcgttgttggaaatgtttgcgagaatcgatgcggtggatatgacaactttgaaacgagttgccaatcgttatatctatgacagagatcctgcagtaccggtaatgggtcctatctttacccttcccgactacaattggattcgccgaagaacattttggaaccgttattaaaagatgatgtgttggagaatggcacaagagtttacaagtcataatataaatctagttggtggcacaagttgtgaacaacgtgtatatttcgtatttataatatacacagacatgaagaagttgaaaaacagaacaaagaa

SEQ ID NO: 2026 - DNA, 384 bp, Cyanidium caldarium
  Clone ID: LIB190-040-Q1-E1-E11
acgcgtccgagtggacgatccgcagacgcgtgagcgaagtgagagttaggcatacatcttttcgtttttgcatcattggttgtaactgctaaagacgcagtgctcaagagacttagagtgaagccgaaccaaacgagctaggttttgctgtgacagagcgataaggaagttgatgtggacagacgtcttttgttcttttcactgcccaacaagtgcaaaagagatccgctcctgccatatgacaaaacaactagtcactgagtacaccgtgcgtctgcgcagggcattctagcagcactatactattcatgagccagtacaatactacgccataacagcctcgttctcagaatagtagaatttttctgcaaacaagctttgggg

SEQ ID NO: 2027 - DNA, 405 bp, Cyanidium caldarium
  Clone ID: LIB190-040-Q1-E1-E12
atcctacgtccaattcacatcatggacaacttataagctctgatggatttgaaacgggagttgcaggttccggtgatattatttttgcatattctggaattttcgtatttatcgaatttatggatgaaatgaggaaaccaaaagactttaacaaatctatttatacagccaatgctattcttttcttttgttactcattcgttggtatcttaggttatgctgtgtatggcaagtctgtggtgaatccaattacttctgctttaagtgaaggagtgatgaaaagactggccaacgcatttctttggttacacatacttgccgcgtttgttatacacggtttgattcttaatcgtgctatagctgtccggttttgtaaagcatatgtggatgattttggttgcgttg

SEQ ID NO: 2028 - DNA, 426 bp, Cyanidium caldarium
  Clone ID: LIB190-040-Q1-E1-E3
actcatttggcacacgaaactgaaaggagtgagcataatgggcaatactatgctttctttcactcgagcgattcctactatcctatcattgtcgcagccattcagctttggagttcggacccttggagtcttttgtcgcaacggacatttgatggacttgattcattaatgtttgtttctgttgccgctaaagcctacttgagggattcaaagttatgagggactgaccttttctgtttgaactagcaggattgaaaactagtttttctgccagatccaactcatatataggaataactccaaacttgggaacacactgctctattctcaaaagatgctttaagagtttatcatagatcatatgtattttgctccagtgaggatgatggctactctaagaacaactttcaatgagtcaatatatct

SEQ ID NO: 2029 - DNA, 371 bp, Cyanidium caldarium
  Clone ID: LIB190-040-Q1-E1-E4
atcgacgtgttgtttaaaaaacctaacgttcgccttcgttggaagcaagttcaattgggtggagatgggaacgtccaagaataataaaccaagcaacaagccaaagtccccctggttcccctccgggccctgtggcaaacaacccgtgatactccttaaaaaagtccccttccaatgcagcactgggtcgttctcatcgctccgacaatgggaaatccaagctgaagaacgcaatcgaaaagctaagcagattctgcaacttccttcgtcttatcgtgttgctatcgttccaggttctgataccggtgccgtagaaatggcgctttggagcttgttaaggccacgtcctgtagatgtttgttaatgggagt

SEQ ID NO: 2030 - DNA, 386 bp, Cyanidium caldarium
  Clone ID: LIB190-040-Q1-E1-E9
gcgtccagttcagacagtgtagagtcgcacaggtcgattgccgatgaacaaaagttgacgtttcccttattatctgatgaacgcggtaaagtacgcaagctatacggtgtaccaaagagcatgtttattatgcctgatcgctgcacttatgtcattggtccggatggtattgtgcgacacatctacaacagtcaagtaggtttcgcataccacgtggacgaggcaaagaaggcgttggcaaatatacgaaacgacgctcaagcagcagaagagtgtgcacacaacactgctttgtggcttcattgatacgcagagggttccagtcatgtgcttcggatggtgtcggaagttactttgttacttgtgttgacgaaacatgtgttttt

SEQ ID NO: 2031 - DNA, 325 bp, Cyanidium caldarium
  Clone ID: LIB190-040-Q1-E1-F1
ccacgcgtccaggcaagcgtccgatgcagtctattgtgtgaggccttccatgtattccacatgcaagcgagtaaagtgaacgcgagtataagaagatgtgtaataaatggcggtcctaaaagtaaagatccatgtgtttcgtagttagtatacgtttgaaacgcgtcctatatgcaaggagcaatcactgtggcactgatctttcgtccgactcagcgatcaagcaatagatgtcagaatgcctaaacttgcactaggacagggacataccatacatcttgtcaagatgagtttaaggacgagagaaattcatggagtgaatgaa

SEQ ID NO: 2032 - DNA, 401 bp, Cyanidium caldarium
  Clone ID: LIB190-040-Q1-E1-F12
accaatattctacctaatctcgtggcgcatatacttcatcttcttccaaggcaattcaaacgtattcaccttccaattcaactcccaggtactcatcttcctatgcaaccaatacttatacttcctatgaagctcctccaatgacttattattatccagaatggtacttggaatgttatcaatggtgtttcgaatgtcttttgtgcaacttggagtacggtttctattacattcaggaaccaactcctactccctattatcccagctattccagttcttatccgatgtacagcagtagctattccagctacagcagttacccatcttatacaaccagttcttatagctcataagaaaggatgctgaatggttggtcaggcgaaggatgcctttttgtatgg

SEQ ID NO: 2033 - DNA, 449 bp, Cyanidium caldarium
  Clone ID: LIB190-040-Q1-E1-F3
ccgggccggaccacgcgtccacccacgcgtccggcgtaatcctggtggtattgttcgatcgaaaacagttacggctagtagtactacaaatgtagaacaagatccatgaccgacagttttgaacgagaagaatgatgtggcaaattgcacgcccgattcaaacgcaaacatcgagtcgcatgattcataccaacttaccgatgagaaacaggagcaagaagatgaagattccgacgaagaatacgacagaagaaagagaaagagaattccttcatgggcccgaagtcataatttaaaggagttgttgcagcagcaagtaagtgtgaatcctgaggaaatatttccccgtgcagatacttgtgatttggaagaaatatttggtcccaatgagaggaataagagatatcggtaagtggacaaaagttcggatggatatcgaataatatcgg

SEQ ID NO: 2034 - DNA, 309 bp, Cyanidium caldarium
  Clone ID: LIB190-040-Q1-E1-G1
agcacaagtgtcagattcaggcagtgaactgacgcattatatcatagaattacacatgcaagtaggtaaagcgaacgggtgattaaatacgtgattcttaatgcgataacacgaaagcatagaagaatttaacaactggttacagtaaaaaccatagacgaagtatacgtgggaatctcacatgaggaaaaccacattcggactgacaattggtccaaataagataagtcagcactggggaatattgggcactgtactcgaaagtatgacacagtaatgacgattctattaaatagaaaacgcattaaa

SEQ ID NO: 2035 - DNA, 394 bp, Cyanidium caldarium
  Clone ID: LIB190-040-Q1-E1-G10
acgcgtccactttagttcatcgttgctcattcttgttgcagatatgacaggtcgtggtaaaggtggtaaaggtttatgaaaaggaggtgcaaagcgtcatcgcaaagtcttgcgagacaatatccaaggaataaccaaaccagctatccgtcgtttggcgagaagaggtggagtgaaaagaatctcaggacttatctatgaagaaacacgaaatgtccttcgtgttttcttggaaagtgttattcgtgatgcagttacttatacggagcatgctcgtcgcaagacggtaactgctatggatgtcgtatatgctctgaaacgtcaaggccgtaccctttacggatttggaggataaagcctgcttgaacaaagggtgtttctcaacacctttcat

SEQ ID NO: 2036 - DNA, 352 bp, Cyanidium caldarium
  Clone ID: LIB190-040-Q1-E1-G12
ggaaggacttaccaaaataaggggcattaataagaaggaaaattggtgaaacttaacccccttctaaacaaaacttaccagaagctttgaaaaaaagagactatatggactgtatatggatatgtgaagagttggagttgcagtcatcactacaaggacaaccttttgagttttataccctctttttctttttactgttattgcgaaaccaatgccacctcgctcatttcttgtggaaacgttgtccctattcacaaagagaaccaaggcttatgacgcttcgagaaatagctctagctttgtgtagagaagactacgaaaccgcattttccttgtgtcgaaataccgattg

SEQ ID NO: 2037 - DNA, 430 bp, Cyanidium caldarium
  Clone ID: LIB190-040-Q1-E1-G4
aggaaatgttcaacttgccttcgttactaaattcgttctttgctgaggtttttgaattctcgcctgtgtacgatgcaagggagaagatattgaactttgaggtgacagactctcatggcatatcttttcgagaccgaatatctattttgtatgtgactccattgacaagagaggacgcgaaagctaatagcgctccagattttgtagattttcttacttttgacaactttcctggttacatgaagtcttatatagatgtatggcgaaacgtacgaagcaggcgcagctcatcaagtcgaagtcctgtcaaacggataaaatttgaaggaagttgagagttgaatgtcgacgtatggatggccctacccgtcacaacggtccttatttttgtaaaagaacgactcacctattatatatagtggaataaaca

SEQ ID NO: 2038 - DNA, 297 bp, Cyanidium caldarium
  Clone ID: LIB190-040-Q1-E1-G5
acccacgcgtcagcccacgcgtccgcccacgcgtccgcccacgcgtccgcccacgcgtctgcccacgcgtccggaaagaggcaaatacgggaaagcagtaaaagaagacagagacacgaaaaaacttagtatcaggaataaaagagggagtagatgaggaatgaaagatgaaggaattaagagttagagatggagtcatctgaacgaaggcaggcttgtagcttaataagacactttatcctcgtactgttattgctaatgtcatgccaactcgctcatgtcttgtggagacgttgt

SEQ ID NO: 2039 - DNA, 406 bp, Cyanidium caldarium
  Clone ID: LIB190-040-Q1-E1-G9
gggccgagccacgcgtccaatttcattcatcgttgctcattcttgttgcagatatgacaggtcgtggtaaaggtggtaaaggtttaagaaaaggaggtgcaaagcgtcatcgcaaagtcttgcgagacaatatccaaggaataaccaaaccagctatccgtcgtttggcgagaagaggtggagtgaaaagaatctcaggacttatctatgaagaaacacgaaatgtccttcgtgttttcttggaaagtgttattcgtgatgcagttacttatacggagcatgctcgtcgcaagacggtaactgctatggatgtcgtatatgctctgaaacgtcaaggccgtaccctttacggatttggaggataaagcctgcttgaacaaagggtgtttctcaacacctttcatcg

SEQ ID NO: 2040 - DNA, 127 bp, Cyanidium caldarium
  Clone ID: LIB190-040-Q1-E1-H11
gcgcatgtcgagttgcgtgtttcagtttttcggtgccgtgcagcgcttcgggtcatttcttcgcatcggttaacagttcagcaactctggttgcagaagacagcgtgggtggtataagcgatcccac

SEQ ID NO: 2041 - DNA, 376 bp, Cyanidium caldarium
  Clone ID: LIB190-040-Q1-E1-H12
atattatcgtgaaccaaattcatttatatatcattggagaatgagtcccaaaaaggaaacaccgcatactcccataggaggctatgcaaaagctgtacttgatagcattgttgctctgaaggagaggaatgggtcctctccacaggccatcataaaatatgtcaaggctcacaatccgcagcttccggaagacaaacttaaacttcaagtaaagttagctttgcgtcgtttgttaaagcagaagcttattgagaaggtgaaagcttcgtataagattgctagcaagagtagtagagttaagaaagccccaaaagaaacaaaagcgaagcgagttgcgaaaacggttcaaaagaaacgagcgaacgatttgcaagag

SEQ ID NO: 2042 - DNA, 212 bp, Cyanidium caldarium
  Clone ID: LIB190-040-Q1-E1-H4
atggtagacactaagcttaaggacggtgctattgctgccctttggacttgccgccaatttctctatacagttgtgttagcattttcagcaacagtaattggacttgatggacggcacgcagataacatatggaacgatgccccatattatcatggaaaagtggtgaacttttgtgcatattcggcttcgtctgtttttgaacgtggcaacca

SEQ ID NO: 2043 - DNA, 188 bp, Cyanidium caldarium
  Clone ID: LIB190-040-Q1-E1-H8
ccacgcgtccgcccacgcgtccgcccacgcgtccgaaaaaaaaaaaaaaaaaaaaaaaaaaaaaagaaaaaaaaaaaagaaaaaaaaaaaaataaatttaaatttaaggggaagatgaatataatagagtgatttataaagggtttaaagggtggtttttttttgagggtctgtgtttgagttttttt

SEQ ID NO: 2044 - DNA, 201 bp, Cyanidium caldarium
  Clone ID: LIB190-040-Q1-E1-H9
tccgggttgttgtttcgttgctgacgatatgcaccgttttgttttcgtaagtggttcaccgacgcttcatatattcgtacattggaatgaattataatcagcgaaggtctccttgatactttgttctggtgtgtgtgttctctatagtactaattttctgttttactatgaaggacgctcttttagttcggcctaattcct

SEQ ID NO: 2045 - DNA, 362 bp, Cyanidium caldarium
  Clone ID: LIB190-041-Q1-E1-A1
agatttgtttacgagagaaagctgtacacagaggagagtgtattgcggcgtcatagtagaaatcctactggcgtatttgaagtgatagagacgaacgacgggaagatatgtgccgtattgaaaaccgacacatgtacactacgagagaggagacccatattgtggtgagataatggacgatgaagtactaagcaagatgatatggtatctgcagtagaacatatgaaagcagcagcaccggctgtttagcaaaaacacagcactctgcagaaaagagatgatgtatagtatatagtgtgccggctgccatatagtagagaagatatcgatgaatgtgaacgcgagtaaaatatggtgtatag

SEQ ID NO: 2046 - DNA, 407 bp, Cyanidium caldarium
  Clone ID: LIB190-041-Q1-E1-A11
gtccacggatccatccaaggatccatgggcggacgcgtgggcggacgcgtgggcttccttggtcagttagtgaagaagaccttcgtgaaactttttccaaatatggagaagttgttgatgcaagggttgttgttgaacgtgaaactggtcgttcccgtggttttggtttcgtatcctatgcagaaggttcctccgtagacgaatgcattgccgcactggatggcaaggatatgcaaggacgcactattcgtgtgaacaaggcaatgtctcgtgaacaacgcgagagtggaggagactttcgtcgcggtggtcgtggacgatacggaggttttcgttccggtccttatgagagacgtgaacgtgactctgatcgtagaagagatcatgacaggagagataacggccat

SEQ ID NO: 2047 - DNA, 402 bp, Cyanidium caldarium
  unsure at all n locations
  Clone ID: LIB190-041-Q1-E1-A12
aaggaanacacagtaaatgaggcgagaaagcataggaagtgaaacggattaggaacccgtgtagtctatgcagtaaaagaaagaatgagtaagaaaaaagggagtcattccaccaggggagtaaaggcgcaagaaagaaacccaaagcaattgacgggaatcggaaaaaggggtggatcacgtaaattaatccgataaaccgagaaccttacctctccaagaaggtgttgcacggctgtcgaaagaacgtgctgtgaagtgagagaacgtacgagaaagccaagtgaggaaaagaaggcaagtagagggcggcccgagaaaggaaagggcgtaagacgtgatacagagtaggaagaaaagagaagagagctagaaaggaggtaaaagaagagtaaaaggact

SEQ ID NO: 2048 - DNA, 386 bp, Cyanidium caldarium
  Clone ID: LIB190-041-Q1-E1-A2
gtccaagtgggacaacgagaggcagagatacccctcgaagaatgtctcgctcacgagactgtgacatcttcacatcatataaaagatgatagcccggaaacaaagccaaaccgctttgcaattactggccacacataggacgaaatggctacagagctaagcattgcttgatgacgacaacaaccggctgcacacgaaaagattacttacttccacggtctttggtaaccctagacattttatatgggtccttgcatcatttgctaccatgggatgaattctgtatggtaattaccagtctttgataagtggtgctggtatttatatgccagttgacctacacattgatcagactagagataacatggttactggctttatgccac

SEQ ID NO: 2049 - DNA, 433 bp, Cyanidium caldarium
  Clone ID: LIB190-041-Q1-E1-A5
gggccgacccaaacgtccaaccccctcctggtgctgctgcagctatagaagaagcgatcaaagccgaagttggaattattgtctgtattaccgaaggaattcgccaaaaggatatggttcgagtgaagactcttttgaatgaaagcacgaaatctcgcttaattggccccaactgcccaggcattttgaagcctagtgagtgtaacattggtattataccaggttatattcattcaacgggttgtattggagttgtttcacgttcgggcatgcttacatatgaagctgtggatcagactacgagacatcaacttggtcagagcattgttatcggaataggtggtgatccgtttcatggaacatcctttatggactgttttgatatgtatttgaacgattcgcatacgaagggcatcgttatgattggcgagat

SEQ ID NO: 2050 - DNA, 404 bp, Cyanidium caldarium
  unsure at all n locations
  Clone ID: LIB190-041-Q1-E1-A7
gtccacccacgcgtccgaagatgcaaagtgctttgaaagaaatagccgactatatggtgacacctggaaaaggtattttagcatctgatgaacctcccgagttgttagaacccaagtttcgagctttgggagtggagaacaatgcagaaacgagaaggacgtggcgtgaaatattatatggaaccaaaggattggagcaatatgttgcagctgctattctgcatagtgaaacttttgaacaacaagattcatccagtgggaaacgtttggtagatgtgttatcagacaaaggtatattacctggtatcacggtggatcaaggtttcgatatattacctggtacctcncaaganacattcacgctaggattggatactttgagcaatcgatgtgaganatatcag

SEQ ID NO: 2051 - DNA, 264 bp, Cyanidium caldarium
  Clone ID: LIB190-041-Q1-E1-A9
aacagttgtacattcaacatcatcaaatgccaaagggaggaaagaaagattcttcaaagaaagaagccacaagtaaacctgcagcagcagatgctacaaagacgacagaaaagtctggtccggaagccaagttgaagggaactggtgcaaagaaacaataaaaagttgactatgcatgtgcagtcctgttatgttttgtgagttctgtttgatagtttccagctattcttttggtagtgaataaagagaaaattttttatattt

SEQ ID NO: 2052 - DNA, 420 bp, Cyanidium caldarium
  Clone ID: LIB190-041-Q1-E1-B10
acccttcgaatgataatcttatggaaccaaaactagatattgcaacggaacaagagactcctttaaccagcacggatgtactattgcctgtatcgctgaaccaacaggaaaacaagactctccaaaactgggcgcatatcgagtcttgtaaaccaaaacgatattttgaacctgaaaccgtagaagatatcgaagtgattgtagaacaatgtcgctcgaataattggaaactaagagtatttggagcaggtcattctccaaataatatagctatgaccaacgattgcatagttagtttaaaaagaatgaatagaattgaaaacattgatgaagaacaaaagacggtgactgcgcaaggtggcacgcttatcaagcaactcaatcaagagctggccaaacacaacttgggcttatccaatt

SEQ ID NO: 2053 - DNA, 280 bp, Cyanidium caldarium
  Clone ID: LIB190-041-Q1-E1-B11
gtggaagaagatggtcaaagagatgcaacaaccggttgcttctcacgctttacgtgcatatgtccctggcaagtttactcgttccgtactaagtatcttgtgcattataagtgcaggtgttattggtgctgtgggagttgtttgttttatattctgtagtatcaatccgagaaacgttatcatcaatgtatatctcattatatttgcagtgttgataatcctttccgagttgggtttcagttttctgttgaagcggtttgcgtttttagatacgtttttt

SEQ ID NO: 2054 - DNA, 340 bp, Cyanidium caldarium
  Clone ID: LIB190-041-Q1-E1-B4
cgcgtccgacaaaaaaaaaatcaataaaaataaaaacataatcaaggtcgacgggctaaaagaggcagactttcatagggtcaatgctacgtgcccggtcatgcaaagtgaaagctcttttaaagtgatcgggaatttcatttcaacggccgtccttggaaaatgccgggattgggaaaagttagccctttgcaaggttaagccccttcgccaacatggcccattcccaaactggtctaatagtttccccgttctcaaaatttgcccttcccaactgttgatcggacagagtcgattaatgggacattccccgtttcgggcctttaagctacgccccttt

SEQ ID NO: 2055 - DNA, 409 bp, Cyanidium caldarium
  unsure at all n locations
  Clone ID: LIB190-041-Q1-E1-B5
ctttcgcatcgtcgggaatgggtcctcggcgtcgtatatcgatactagttgactgccctccactggcccaaggtttggcaangaaccccagaacctagattaagttactttaaaagaaacttgcaaagtaataatttcctttcgcaaaatatctgtggtcacaatggaccacatccttgtgttttgcccgtcactgttttccacattggttcaatggcgtcacacttgttacaagtgacccgtaagggtcgtttcttgaactgcacttgaacccaacgcgatttaaattgacgggatttggaaaccacggtaagttatttgtcccataagcaaaacgtccagatgattattggtcgttgctactcctggataaaacatgaggaaaactacaccgccactgcaaaggcat

SEQ ID NO: 2056 - DNA, 353 bp, Cyanidium caldarium
  Clone ID: LIB190-041-Q1-E1-B9
tgttgtgctatatccttttggaggaagctcatggaaggaaaggatcgtccaagtttatggaaaaaagctttgaaccgtgatactgtgtgggaaaaggacgagatattagatgtgctgttttggatccgccacgtggtagctctgttgataggttgtctattcggccttctcaaattaactggcttaccaggctttattctttacatatctatttggttcactatttctcaggcgtaagtttcatgccttgtagaaagaaagaataacactactcgttcttctttctagttatttcaagtggtttttagatttagacgaagacgactttggtggttggggaaccgtacaacaag

SEQ ID NO: 2057 - DNA, 400 bp, Cyanidium caldarium
  Clone ID: LIB190-041-Q1-E1-C11
gtggaaaactggccttttatcaattcttccttcttaatatcacaacaacctaatagggagatatagagtcacgcaaatacgtgttgcaaattgggaagatattcaagaaaaaaaagttgggagagcgtgcgcaacgcttcggctccgcttcctttaggaatgaagaatgaaactcgcgatgaacatacaagtactccaacgaccaccgcagaggttcctaccaaccgccaacctatcatacacgaccgttttcagacggcgcctttggaagatgacgccatgatggaagacgacgatcaagtcgtttctactagtatctcttcttggatatagcaacaaagcgctgttggacaaaagtcggatgcaactcccaagttgctttccctcgttgtcgttattt

SEQ ID NO: 2058 - DNA, 409 bp, Cyanidium caldarium
  Clone ID: LIB190-041-Q1-E1-C12
ctgccttttagcattcttcttcttatatcagacaacctataggagataagagtcacgaaatactttgcaaattggaagatattcagaaaaaaaagttggagagcgtgcgcaacgcttcggctccgcttcctttaggaatgaagaatgaaactcgcgatgaacatacaagtactccaacgaccaccgcagaggttcctaccaaccgccaacctatcatacacgaccgttttcagacggcgcctttggaagatgacgccatgatggaagacgacgatcaagtcgtttctactagtatctcttcttggatatagcaacaaagcgctgttggacacaagtcggatgcaactcccaagttgctttccctcgttgtcgttatttctctatctcttccgctgcattgttttcttga

SEQ ID NO: 2059 - DNA, 402 bp, Cyanidium caldarium
  Clone ID: LIB190-041-Q1-E1-C3
aagcttaaacaaactagtaagctcgttggaatgttgctttctggagcgaagtcgtcaagaagggtccaaaatgggcaccatcttctcccaagtagcacaatcctttgcaaaggatatgttctatctcaagtcgcaaggtgaagaatggctagatgctgtgttgcaagattattcattccttgctcgtgacgcccgacgggttttaggtgaacgtttacaagcatacgaatcttatgaaaaggctctatcagaacacaatgaaaggatgcgaaaactggaaaatggtcatatgtcctcctccacgtcctcgcaacacacggaaaaccccaaccacggtgctacttctagtagtaagcagttgaatgagtgccgtcagttgtatgaacgagcggcttatttgac

SEQ ID NO: 2060 - DNA, 409 bp, Cyanidium caldarium
  Clone ID: LIB190-041-Q1-E1-C9
accacgcgtccgcccacgcgtccgggttgctcaaggtgtgaaatggcagtagttgaagataacagagtctttgttggtggtcttccttggtcagttagtgaagaagaccttcgtgaaactttttccaaatatggagaagttgttgatgcaagggttgttgttgaacgtgaaactggtcgttcccgtggttttggtttcgtatcctatgcagaaggttcctccgtagacgaatgcattgccgcactggatggcaaggatatgcaaggacgcactattcgtgtgaacaaggcaatgtctcgtgaacaacgcgagagtggaggagactttcgtcgcggtggtcgtggacgatacggaggttttcgttccggtccttatgagagacgtgaacgtgactctgatcgtagaagag

SEQ ID NO: 2061 - DNA, 429 bp, Cyanidium caldarium
  Clone ID: LIB190-041-Q1-E1-D10
gttgagattttgtggatgagcaaccacttgtcgttgcaagaaaccaagtcgcattttcgtaaccgagtcaatggactgatcgagcatattgcgagtagcttgagggtataaagagagagagaatagttggaagttttgtcttttgaaatacataggacttgttgcgacagggagctgaacccagtccgtggaaagactatgcaggggaccttgagttgcgactcgctgtataaagtatttgtagggattttgaagagcttataaccttgtcgtttgaaatacaagtgttgacaactcaaggcaatctaccccaaataatgtcggaaatagaccacatagagacgtctgtgcagaaccgcataggagagattaacgatgcactggaaaaaacgggtatgcacttgtcttttcacgtctgcaacgactcaa

SEQ ID NO: 2062 - DNA, 289 bp, Cyanidium caldarium
  Clone ID: LIB190-041-Q1-E1-D12
tggaaacagaggtggtattgccatggcgaaacatcaccctgaccttattatgtgtcgaaagcaacctggaatagccgtcggaagactttgtgaaaagtgtaagtgttatcttctctttattttgttctcctcatacttgcaaggtgacggcaaatgtgtcatatgtgactcttacgttcggccttgtaccccggttcgcatatgtgacgaatgcaactacggctcatttcagggacgttgtgtgatttgtggtggtgtcggtgtcccagatgcttattagtgtagagag

SEQ ID NO: 2063 - DNA, 447 bp, Cyanidium caldarium
  unsure at all n locations
  Clone ID: LIB190-041-Q1-E1-D2
attcaagggtcgnacgacgcgtccgggacaaagcaacaacgcgagtggttgataaagcaactagccaaatatggtttagaacacgtcgacgagttggttgactatcttttacagtgtgaagataaagttattcttaaggaataccttgttggtttattacggaatgatgaataggccgaagcacttgttcaagaattgtttgccaaacaggaagctaccaacgaacaaacagatggaaaaggaaaagacacaccaaggtacaataagaaagttcacaaaggtcgcaaaaaatcgtatggtccgagcaaagatagttcttccacggagaatgataacaaggctagcacaccttttatgcgaaattgtttgtgctgtgggaaggtaatcatggaatatatcagtcgttgtagtttttgtggttggtcaccggaagaagatgctgagaaa

SEQ ID NO: 2064 - DNA, 402 bp, Cyanidium caldarium
  Clone ID: LIB190-041-Q1-E1-D3
cgcacgcgtccaaagaagatcaaacagttgccaaatgtatttgggacactttgcatatagaaccactcaatgttcctgagttcaattctggtcaaccaggatatgtaattccggtcacccgagacagtatgattgcatttcatcaaattgaaggaatgaaggatgcacagaacttgtttcgaagattttacttggataagaatcgatttgactcgggaggagatgtcgttccgtaaagaaaaccaactctactcactcacatgtctatgacgttgcctcgccggaaaccaagtcattcggatcaaaatatattccttttacagtaccatcgatacgagcaagtatctgatgagtcactttcatagcgtccacgacgaaaatatgatcaccttgtttcacttg

SEQ ID NO: 2065 - DNA, 457 bp, Cyanidium caldarium
  unsure at all n locations
  Clone ID: LIB190-041-Q1-E1-D4
attcaaggggtcgacgacgcgtccgcagcttacaagttattggaagatttcttgcagaacgaatatagtcctcatgctagaagaaccgctggcattgtcgattggaacgattcaaaagccatttatgaaggagcaatagaatattatacatctttgtcttttacagctcaagagttgcactctattgggaagaaagaagtgaaaagaatatcggaagaaatcgatcaagtacgagaacgcttacaacaaacacaaggatcacttgcatcctttattgcccaattacgacaaaatccacaactctttgccaaagactcgcaagatattatagaaacatataagaacatactggataagattggcaccaatgtttcagattactttgccaaacttcccagagcacgattggaactaaaacctatcgagtcatatcgagaanagtccgctccacccgcac

SEQ ID NO: 2066 - DNA, 427 bp, Cyanidium caldarium
  Clone ID: LIB190-041-Q1-E1-D7
acggacgcgtgggcggacgcgtgggcggacgcgtgggttttcaaccgttgttgttctgacaatgaagattcaattgtttatataatagcgatacaagggtgcgataaacgacgaatttcaggctctaagctatccatgtttttgcattggcgtgaaaaccttacttctcaagtgacaaatgtatctggacgactcggaaaacagtattagtgttctaagcgtcactataagacgcgcgccgatcattcgattttggcttgcaagttgaatttgtctcaccgagaaactccttcaggcttatgcttccatttgaacacttgctatatctggcaacgtctgaataactgggtttcacagtaaagaagggtgcaagcttgatttgatgagatgcataccattgttgccgctggacctgtagctctccaat

SEQ ID NO: 2067 - DNA, 413 bp, Cyanidium caldarium
  Clone ID: LIB190-041-Q1-E1-D8
agtacccatgagaagtcagctacttcaactgtccaaagtgtttcaaacttttacagaaaaacaattttcatctagcgtctccaagttccagcttcccgatctaccctatgactatggcgagttggaaccttacatcagtgcagaaatcatgagacttcaccaccaaaaacaccaccaaacctatgtcaacaacttgaatgtcgcattggaaaagatccacaaggcagaagaagctggtaacgtgggtgatatgatcgcgctgcaaaagatgctcaaatttaatggaggaggtcacgtcaatcactccattctttggcacaacttggctcccgtgaataaagggggaggtactcgccccgatggagcattcttaaaagcagtggaaaaagaattcggctcattggacgctctca

SEQ ID NO: 2068 - DNA, 350 bp, Cyanidium caldarium
  Clone ID: LIB190-041-Q1-E1-D9
tcgttttcttgtgggatggtttgtctcctcatgcttgcgccgtcgctggcattggtcattcggttggttcgtgtgccttttctgtctggccactcgcttgttctgcatctctgtcttttacagcgcacgagttggctctattgggaagagagaagtgtatcgaatatcggctgaaatcgatgctgtacgagaacgcttacaacaaacacaaggatcacttgcatcctttattgcccaattaggagaatctccacaactctttgccaaagactctcaccatattagacagatatctgataccatattggataagattggcaccaatgtttcagattactttgccacacttc

SEQ ID NO: 2069 - DNA, 419 bp, Cyanidium caldarium
  Clone ID: LIB190-041-Q1-E1-E10
tgaactttgttttggaactgtttttttggggtttcactcgtgtgttttgtctttttaaaactcgaagaagactatttatttcttgttatgtttgagaggtgtttctagagtgtgttttgtggacttgttgtactcctgtcttggtggttggtgaatggctctagtgacaaagagggttgtcactttcccgccattctccacagcttcaactaccaacctgtatacgcacacaactacacaactatattactacagagtcgtggtgtaaaacgacaagttgaatggttgaaaaggattggtgaaaagtggaagactagtgagagagagcacttgaaaacttgtatatttgtaccccctagcaactatttcctcttgaagagattgcaagtttggtgtagtagacaagagttgcaagtgtc

SEQ ID NO: 2070 - DNA, 335 bp, Cyanidium caldarium
  Clone ID: LIB190-041-Q1-E1-E12
gtaaaagaagaaagagaaaggaaaaaactgagtaccaggaagaaaagagggagtagatgaggaaagaaagatcaaggaagtaagagtaagagaaggagtaatgtgaatgaaagcaggaaagtatttgaagaagagagtgtaaagcgcgtaccttttgcataatgtcccagcgagtgaaagaggaagcataaagaaagaaaaagaagtagccaggtaagacccgaagctagttgatcttatgctgtccaagcgaagtaaggctgaaccagtatctgtggaaaaagatttggaagttaaggcaaaaacacgtgccagcagcagcggtaaaacgtgtg

SEQ ID NO: 2071 - DNA, 328 bp, Cyanidium caldarium
  Clone ID: LIB190-041-Q1-E1-E4
aaccacgagtccgcccacgcgtccgccaggaattttcattggtttttatggacgttttgttactattgcttggttctatgccatgtttatgatgcctgaaaccaaagataagactttggaagagattgatgctttgttttccatgtcgatgcctgatttagcgaaacataattgggataatgtgaagaagacagtggatgatctcttgcattttacgttgagagaagtttggaaggtttacaagtgagcgatgattgttattgtttgattttttgagtattttacttgtttggtaacaataaaagcataaatgcgtgcataacatttc

SEQ ID NO: 2072 - DNA, 390 bp, Cyanidium caldarium
  Clone ID: LIB190-041-Q1-E1-E8
acccacgcgtccgcccacgcgtccgggaaatgagtattttcgcaataaacagtacaaggaggcatgcgagtgttatactgttgctcttagtaaagaaatgagtacagaagaccgggcagcgtgttttgcgaatagagctgcagcaaagctaaagttggaggactatgaaggggctttggaggattgttccgaagctttgagcttggatgaaaactattggaaagcaaagtaccgacgaaaggaatgctatttgaaactgggtcgttatgaggaagctttgaaagatgcaaaggcactaagagaagcacaacagatatcttcggaagaagtacaacatatagaaaagttgaaggagcgagacgatgaaagacgtaaagaagaagctattgc

SEQ ID NO: 2073 - DNA, 409 bp, Cyanidium caldarium
  Clone ID: LIB190-041-Q1-E1-E9
cattttgtagttatgaaaggaataacaaaatgctctcttattgttctcatagttaccactcttatggtaaccacaacttcggcagttttgccgatgaatgacgaactggctagagaaatacgtagagctcttcaatggaactctgaattcctaagacaattctcgacaggattcccgtcagctaccgaggctccgataccaacagagataccgataccaacggagataccaattccaacggtgacaccaactcctgcgcctactgctacgtccgtttcgaccacttcagcggtgccaactctggtaggaacttcaagtaacccaatagtgactgtaataccaacagctccaccttccggatttcctcttccttctggctcgattcgaaaagccttctcgaaagctgaac

SEQ ID NO: 2074 - DNA, 311 bp, Cyanidium caldarium
  Clone ID: LIB190-041-Q1-E1-F10
gcaaacccaataatggaatgggtgggattgcaccggccaaagaacccggttcaaccaaccgttgcaaaatatactttggatactttgttggatactgtgcctgcttctgttgccggcattgcctttctttcgggaggtcaaacggaagaggaagcaacgacccatttgcaagctattcgtgaaagagcaaaggcaactggaagagcaccttggccattgacattttgttatggtcgtgcacttcaagctacgagtttacaaacgtggcaagggaaagcagaaaatgtggagaaagcaagagaacaattttt

SEQ ID NO: 2075 - DNA, 421 bp, Cyanidium caldarium
  unsure at all n locations
  Clone ID: LIB190-041-Q1-E1-F12
ttatggtgcaaaaaactttgctgcaatattgcaattgcaattagaaaaaataaagggtcaaaactctttggactcggctttgctttgtatcaaaaccggcaatgaanagaatccgagactgtcaagttacccctttttgtcggtagagagtgacggggcagtaccaagacgccatgactacgcactcggtggcacataatagagaaagactagggcaaaggactgatggtgattcgataaagagtaaagattcgtggcactggtaccgtaccaaccgctggctcgtcatttacatagccagctggtcgttgcattgtcacgtgcgaagtgagcttccctagaagaaggttaccaagccatcttggaatcatccagattttatatcgattggtcattcaaactttttaaaaaaagtaacgca

SEQ ID NO: 2076 - DNA, 398 bp, Cyanidium caldarium
  Clone ID: LIB190-041-Q1-E1-G10
gccttactgaaaaccgacacaggtactcaaggaaaaaggaaacccaatttaaggtgagagaatggacgataaggaactatgcaaaaggatatggtatctgcggtagaacatatgaaagaagcagcaccgactgtttagcacaaacacatcactctgcagaaaagagaaaatgtaaagtatacagtgtgcggcctgccaaatagtagagaagaaatcgatgaaagtgaaagcgagtaaaagatgaggtatagagaatggcggtcctaactgtaaggatccaaaagtagcgaagtaaataaacgtttgaaaggcgtccagtatgaaaggagaaacgagtgtagcactgtctactcgtccaactcagcgaaacagcaataactgtgaaaatgcagtaaact

SEQ ID NO: 2077 - DNA, 429 bp, Cyanidium caldarium
  Clone ID: LIB190-041-Q1-E1-G11
accacgcgtccgcccacgcgtccgcctttttgtactccttcaccaacttctaggtacaagtctccgcttaggagaggtgattggccagaaagctgggagtctgctcgaagtcttggcgctagttcggtccaaccaaaagactcagaaacagttgtatctcgggtgaagcatatgatttcaatggttattcaaagaagcacttgtctttctctagcgactttggataaatggctgtctttattgtgtgattttatagaattcaatgctgacgagtatttacttttcctcgtaatgctaaggaagtatttaatatccaacggtcagttgcagagccttgaagatcacgtgagaccacagaaatgggagcgcgttcttgctgtttgtgcatactttgttgtcctcttatcagaagagtttactggccgaatc

SEQ ID NO: 2078 - DNA, 398 bp, Cyanidium caldarium
  Clone ID: LIB190-041-Q1-E1-G12
ggagtagaaaagagctttaaaggatttcacgggaaaatcttgcaatgaaaaaaacggttggccactgaatcctggaaacggagctttttacggcccaaagattgatgtgaaaatccacaattccttacagaggaaacatcagagcgcaacgattcagctggactttcaacttcccattcgctttgatttggtgtatcacgcacctagtcgtccgaaacaagattcttctcccactgaggaagaagagcctgaactgcaccgtccggtgattattcatcgagctatattgggttcggtggagaagtttttgggaatttatacagaacattgtgctggcaaatggcctttttggttgagtccacgtcaagtgatcgtcaatcctgtaagtgagaaatata

SEQ ID NO: 2079 - DNA, 422 bp, Cyanidium caldarium
  Clone ID: LIB190-041-Q1-E1-G8
cacgcgtccgcccacgcgtccgaacctcaagtggatcattccacgttggtaaagatagacttgtctcaaggcagctttaaagtactccaagactgtgacaaagatttagaatgtgatcataataccaagtttcagttggaacttattcagtatggtctcttttcacctggtttttggacgagagaaaatgttctgctcttctatttggagctcgtgtcaggtgtattcataagggacactctctaccttttctacaacaaaggtgaagaacatttgtttgcgagtttaatgctgttgttggagacacaagtctcactgtatgcagacataaaaacaaactgggagaaacgacactttatcgttggcctcatcgtcaggtctttgtgtgaggaatatcaacgacagtattcagagctatgttc

SEQ ID NO: 2080 - DNA, 391 bp, Cyanidium caldarium
  Clone ID: LIB190-041-Q1-E1-H10
gtccaggtctccgggtcgatccaaggacgcgatgggttttctccccaaaagatgtccaaagcatttggtatcttagtgagacttgagaaactagtcgtgaatcatagcaagtattgttctcgtattcactatgaccatcagatggataaaactcgatatggttattattccatatttcgtcgtctattttctactcaaaaacaacctttggaccatggagacacaactcccataaagtcatcttctgctttgtttgctgcaccacagttggatagtgaaagaaccaaagtctctcctttgtataaattgggaaaattgaatcacattgctattgtagttcaagacgtgcaagacgcagcagagttgtatagaacagtgtgggaagcagatg

SEQ ID NO: 2081 - DNA, 96 bp, Cyanidium caldarium
  Clone ID: LIB190-041-Q1-E1-H11
ccacgcgtccgaccacgcgtccgcccacgcgtcagctcatgcgtcaggtgtctcgtgcgtggccgcgttggtcgactcggtccgtcagtcacacat

SEQ ID NO: 2082 - DNA, 124 bp, Cyanidium caldarium
  Clone ID: LIB190-041-Q1-E1-H12
tttacagacatttgagggttatgcctcgtccttctcctcctgaatcttctatatcgacgaccattacgggaaaagcgatttgtagttaggttcctgcgctcttagaggacggagatcgcgtatt

SEQ ID NO: 2083 - DNA, 430 bp, Cyanidium caldarium
  Clone ID: LIB190-041-Q1-E1-H2
ggtcgaccgacccgtccgagtagaaaaaagagagtgtaaggcggcgtcataatagaaatccgaaaggagtagaagaaaagagagagaagaaagaaaagaagagaaaagccgtactgaagaccgacacaggtactcgaggagaaaggagacccaaattaaggtgagagaatggacgataaggaactacgcaaaaggatatggtatctgcggtagaacatatgaaagaagcagcaccgactgtttagcaaaaacacagcactctgcagaaaagagaaaatgtaaagtatagagtgtgcggcctgccaaatagtagagaagaaatcgatgaaagtgaaagcgagtaaaagatgaggtatagagaatggcggtcctaactgtaaggattcaaaggtagcgaagtaaatagacgtttgaaaggcgtccagtatga

SEQ ID NO: 2084 - DNA, 292 bp, Cyanidium caldarium
  Clone ID: LIB190-041-Q1-E1-H3
acgcacgcgtccacccacgagtccggtaaggcggcgtcctactagaaatccgaacggagtacaagaggacatagagaagagagaaaataacagacatgccgtactgactaccgacacaggtactcaaggagacaggacacccacttcaatgtgtgagattggatcgatcaggaagtaagcacacggatatggtacctccgttgacactctgactgaaacagcacctactgtttagtaagaacgcaccaatcttcctaccagagataccgtatcgtatatagtgtgcgtcctg

SEQ ID NO: 2085 - DNA, 444 bp, Cyanidium caldarium
  Clone ID: LIB190-041-Q1-E1-H4
gtctagggtcgacggacccgtcaagaaacaaaaatatttgtcgtttttggcgccttttgtgtatcagcgttttctcgtgtgtttgtttacttggaacgctctgttgattgaatgttttcattctaatttctttgtagtcgaaaccattcgagggtttgttacactgactgttggtgcccctgttttagctcttgccgctagtctttcgtttgcgcattattatcgacgcaaaagtatgccgatttttgcaaaggaagacacatttttcgagtgatggaacaaggtttgcgaaaataaagaatagttgtgttattcgttggaaaaaaaaaaaaaaaaaacaaaaaaaaaaaaaaaaaaaaaaaaaaaaaaaacacaaaaaaaaacaaacaaaaaaaaaaaaatttaaaccccaaaaaaaaaccatttaaaaaaaagggcggcccc

SEQ ID NO: 2086 - DNA, 427 bp, Cyanidium caldarium
  Clone ID: LIB190-041-Q1-E1-H5
agtctttgaagtgaaagccactgcaggtgatactcacttgggaggagaggactttgataatagactagttgactatcttgccaaggagtttaagcgcaagtataacaaggatatcacatctaaccatcgtgccatgagaagacttcgaacggcatgtgagagagcaaagaggactctttcaagtgccactcaaactacgattgaagtagattctttgtatgaaggtatcgacttctacaccagtattaccagagcgaagtttgaggacttgtgcatggacttgttccggaaatgcatagaccccgtggagagagttcttaaggactctggattgtccaagagtcagattcatgatgttgtgctagttggaggctcaactcgtattccaaaggttcagcagctgctgcaagactttttcaacggcaag

SEQ ID NO: 2087 - DNA, 402 bp, Cyanidium caldarium
  Clone ID: LIB190-041-Q1-E1-H6
agttgtttagtcgaagaatggcaaaaggagaggcaggagcttcaaggtcaggtggagcagctaagaaaaagaagtggtcaaagggaaaagtaagtgttggaatgaattgactgtggaaaattaatatcctgcaaaggtaaaagaaaaagtatccaacacggtgttcttagatgaagagacctacgaaaagttgtacaaggaagttcccaagtacaagctaataactcctgctattgtttcggaacgtcttcacgtaaacggtagtttggcaagacaggctatcagagagctgttggcaaagggtcagatttctcttgtgtcgtcacagcgaggcactcttatatgctccagagcgggaacggcggcatgactttttgctttgaaataaaagcactttagaac

SEQ ID NO: 2088 - DNA, 223 bp, Cyanidium caldarium
  Clone ID: LIB190-041-Q1-E1-H7
gaaaccactgcaggtgatactcacttgtgaagagacgactttgatactagactacttgactatcttgccaaggaatttaagcgctagtataacaaggatatcacatctttacatcctgccatgagaacacttctatcggcatttgagacaccaaagacgactctttcaattgccactcaaactacgaatgaactatattctttgtattaatggtctcgacttc

SEQ ID NO: 2089 - DNA, 411 bp, Cyanidium caldarium
  Clone ID: LIB190-042-Q1-E1-A3
gtccagggacgcgtcagacattctgagtgcgctgatgagtcgatgaacaagcttcagttgctattcgtaatcagtcaagctgtttcaatagcatggcagagagaatagatcaggttatactccgagaacaaatcagttgcatgaggaactttgggaaccatgtggcatgaacgagattctgcacagtagagcgcgtactttactcgtgaagatgagcaggcagtacaaaggttagcatcaaaacttcggcatcaagttgtgccatcagacgacgtattcgcccaacacagataaggcgtggcagagatcttacagttccactgtgtcaagtctaatcaaactttgagtgaagatattgtccgtttctttcattacttcatccgtgattgatgtttagctgcagttcaacta

SEQ ID NO: 2090 - DNA, 226 bp, Cyanidium caldarium
  Clone ID: LIB190-042-Q1-E1-A5
ccgggccgacccacacgtccagggctcgcataggtaaggaaaatgtaatgattcacttttggaatctatccatttttggcaaatttggtttcaacctgatttttgtatactaaggataataaagatacgttgaaaattttttgtattccttgatgacttgtgaaatggaattgcgtttccaactcgtgtatgtagtctctctttaataaagttcccaacttggaaa

SEQ ID NO: 2091 - DNA, 409 bp, Cyanidium caldarium
  Clone ID: LIB190-042-Q1-E1-A6
ggagaaaagttttgtcggttcgtcgtcgtcgatttttccttcgacttgggcgccaatcttcttcttcttcttagaatgaaattgaatatcgctaatcccgctactgggtgtcagaagcaaatagaagtggacgacgaaagaaaacttcgtgctttttttgacaaaagactggcgcaagaggtcccaggagacgctctaggagacgaatttaagggatatattttcaagatcatgggtggacaagataaggaaggattcgctatgaaacaaggagtcttgaccactggtcgtgtaagactcttattaaagaaaggagactcgggttgccgagggtacggtatgagagacggtgaaagaagacgaaagagcgttcgcggttgcattgtatctccagatatagctgtgttga

SEQ ID NO: 2092 - DNA, 404 bp, Cyanidium caldarium
  Clone ID: LIB190-042-Q1-E1-B6
acggacgcgtgggcggacgcgtgggcggacgcgtgggcgcgacaacaacaacaggaaattcattgatggacaaacctcaagtggatcattccacgttggtaaagatagacttgtctcaaggcagctttaaagtactccaagactgtgacaaagatttagaatgtgatcataataccaagtttcagttggaacttattcagtatggtctcttttcacctggtttttggacgagagaaaatgttctgctcttctatttggagctcgtgtcaggtgtattcataagggacactctctaccttttctacaacaaaggtgaagaacatttgtttgcgagtttaatgctgttgttggagacacaagtctcactgtatgcagacataaaaacaaactgggaaaaacgacac

SEQ ID NO: 2093 - DNA, 238 bp, Cyanidium caldarium
  Clone ID: LIB190-042-Q1-E1-C3
aagggaggaaagaaagattcttcaaagaaagaagccacaagtaaacctgcagcagcagatgctacaaagacgacagaaaagtctggtccggaagccaagttgaagggaactggtgcaaagaaacaataaaaagttgactatgcatgttcctgttatgttttgtgagttctgtttgatagtttccagctattcttttggtagtgaataaagagaaaattttttatatttacacagagat

SEQ ID NO: 2094 - DNA, 413 bp, Cyanidium caldarium
  Clone ID: LIB190-042-Q1-E1-C6
aaagaaaggaagacacagtaaatgaggcgagaaagcataggaagtgaaacggattaagaacccgtgtagtctatgcagtaaaagaaagaatgagtaagaaaaaagggagtcattcgaccaggggagtaaaggcgcaagaaagaaacccaaagcaattgacgggaatcggaaaaaggggtggatcacgtaaattaatccgatttaaaccgagaaccttacctctccaagaaggtgttgcacggctgtcgaaagaacgtgctgtgaagtgagagaacgtacgagaaagccaagtgatgaaaagaaggcaagtagagggcggcccgagaaatgagagggcgtaagacgtgatacagagtaggaagaaacgagaagagagctagaaacgatgtacaagaagagtaaaggactagaag

SEQ ID NO: 2095 - DNA, 421 bp, Cyanidium caldarium
  Clone ID: LIB190-042-Q1-E1-C9
agttgattcgaggaaaaaccttggaagaagcgagtaaaattaagaataaggaaattgcagaagagttgaagctacccccagtgaaactacattgtagtatgttggcggaagatgctattaaagcagctgtcaaagacttgcaaaagaaaatgggtgcttccagtgcctaaaagacgatggaagtttctagtctttctcttcctcctttggtgtggagaagagttgtgtgtttgtgtgggggaagagaagaattggtgtgtgagtgaatagaatattattggaaatagaagatggaaaaggcaatagaagcaaagaatagaggaaatgctgcgttttctgccaaggaatatgacaaggcagtggaagcgtttaccgtaagttgctggactctggaacccttttgttgatatataaatatata

SEQ ID NO: 2096 - DNA, 355 bp, Cyanidium caldarium
  Clone ID: LIB190-042-Q1-E1-D11
attgtgattttacgcaatctctggaggaatatcgaacacctcaataaaccctttgtgtgtggaagtgttgttttgaaaatgttaggctttgtctcaggacagtctctgagctactttacgtgtatgaacaaagacgagagtttgcttttaaagtgtaaacgtcgggtaccatattcacgaattcactgtaagccaagtcatttggctgacaagagactaagacggacttctcgtaagtgctgcttagttgcgttcgtatagttgcagaatttttcctcagtttgcgtttcgtgtcacagcccttcaagtgactctgagcaacagttggcctgttttcgttgggtgcgttatatgc

SEQ ID NO: 2097 - DNA, 394 bp, Cyanidium caldarium
  Clone ID: LIB190-042-Q1-E1-D5
accacgcgtccgcccacgcgtccgcaagattgttgtttcgtagtttatgtagcaacaatcggaatacttttcgcgaggaatgggaacatttaccgcaacaagaacaagaatggaaaagagcaggcaatacggaaaaacaaggttcattgggagaaagaaaaccctaccctttgaagcctcttgacttggataccagatggagtcttggaagcttgaaccgtgccatacttataggatatgtgggtaatgatccggtgaaaagagaaatttcttcgagcacggtcgcttggatgtttcccttcagtaccgcttacaagaaaagaacgggagaccaagaaacaatcaccgattggcacaatgtgacagtttaagcctccccctccgcaaagttttt

SEQ ID NO: 2098 - DNA, 408 bp, Cyanidium caldarium
  unsure at all n locations
  Clone ID: LIB190-042-Q1-E1-D6
actcaacgacgtaatgagactcactcattttctctttgttttgtcttttgtagctgttttcctcgtagctcatgcagttcccgttggagaagatgcattcagtttcagtcagacttttggaaatgcttctgcttcaggcaacgcctctgttattccagctacaaccaagatccccaagttagaagtaactagtagtgcctcatcaaaggacaatggaaaagcagctcaagtagactttgcagattactcaaagggatatccttcgcctagctatttttacgctccttcttacacatcctatgtggaatttcctcaatatccatcctatccatcatggccttcttttaatgagcagcctgcctttggtggcttcgatcccaatgcanagtttggagaatccgaaatttt

SEQ ID NO: 2099 - DNA, 399 bp, Cyanidium caldarium
  Clone ID: LIB190-042-Q1-E1-D8
cccacgcgtccgaagggattttgaaacgcaaggaaaaagaatattgcgtgagtttggtttgcagtcgattattcagcagacgccatcgtttaggaattctattgtgtgtcactcagttggtagagatggactgattgttccttattatctcatagagaagatgaaaatgaagcgtcaactggaaaatctaatagcacaacgacgtagcgggacctggacagtggaaggaaagaaaggaaaagttgatgtaaagaaatatcactggacggctaaggagaagaatacctttttcagacttgtgaaagaattagggtgcgactgggaaaagattgcggaacaaattcctaccaagtcacctttgcaacttcgtgccttttatgatgagtacatgtcacagag

SEQ ID NO: 2100 - DNA, 359 bp, Cyanidium caldarium
  Clone ID: LIB190-042-Q1-E1-E11
accacgcgtccgcccacgcgtccgatcgtcttccacgcggaagtaatatgatcgatcgaacagcattgcgcaatgttggaatgcagtatgtaacaaccgcggatgatattggacatcgcttggtcgtagagatccaactaaaggaatccagcatatataatagtcacatgaaggaaggagaacgaccaaatgcggttacagatatcatttctacggaccctgaaatggataggaaagtatctcagtgggtgtcggaaggacaaaaggcattcttagtagaagatgagttgacgggtgaacgtcgaggaatattcttaagctcaaccaaattgaaatttcagaaacaaccaattcaggac

SEQ ID NO: 2101 - DNA, 406 bp, Cyanidium caldarium
  Clone ID: LIB190-042-Q1-E1-E2
accacgcgtccgcccacgcgtccgcgcggtttaggtcatcaagtagcaaccgatgccttgcagttgatggaagaagctatggcaaaggatcatctaaagttgaacgatcgtcagcttgcttgtgctcgaatacaatcgaaaccaggtcaggattacttggaagctatggcagctgcagctaattttgcctttgtaaatcgttcttccatgacatttttagcgagacaagccttttctaaagtattggatgccagtgcagatgacctcgatatgcatttggtatatgatgtgagtcataatattgccaaaatagaggaacattggttggatgggaagcctgttcagcttttagtgcatcgtaaaggtgccactcgtgcctttcctcctcatcatccactcatacctg

SEQ ID NO: 2102 - DNA, 263 bp, Cyanidium caldarium
  Clone ID: LIB190-042-Q1-E1-E4
gcagtccatgctcagctgcatactgccacctgacagttttgcaagtttcatgtatgtatctggaaatgcgaagtttcctgatcatgtgtcccgtatgccttggtcaacaacctgcggctagaattgtgaagcgaactactgctgttgcaaaattcagcaaacacgcctactgttaatgcagtgggtctaattgaatcacgactgtctcataatgttttgaagtagcattccagaatacatacagttgtacccaagttcttgcc

SEQ ID NO: 2103 - DNA, 389 bp, Cyanidium caldarium
  Clone ID: LIB190-042-Q1-E1-E5
cacacgtccaggagtataacaagacagagaaaggaaaaaactgagtatcaggaagaaaagagggagtagatgaggaaagacagatcaaggaagtaagagtaagagaaggagtaatgtgaatgaaagcaggaaactatttgaagaagagagtgtaaagcgcgtagcttttgcataatgtcccagcgagtgaaagaggaagcatagagaaagaaaaagaagtatccaggtaagacccgaagctagttgatcttatgctgtccaagcgaagtaaggctgaaccagtatctgtggaaaaagatttggaagttatggcagagacacgtgccagcagcagcggtaaaacgtgtgtaccacgcgtagagcacaggaactgggtgtaaaggtcgagt

SEQ ID NO: 2104 - DNA, 404 bp, Cyanidium caldarium
  Clone ID: LIB190-042-Q1-E1-E6
ccgggccgatccaaacgtccaggaaaagagagtaggacgtggcaacggtagtggccgtggtaactattgtggaagagggataaaaggacaaaagaagcgacaaggaggtcacgtgaaaccttggtttgaaggaggtcagacacctcttttccaaaggttaccacagcacaagtttccaaagacttggtatgataatcatgagttggtatttttggcagaagttcaacgtttcgtggatattggcaagttggatccttcacaaccggtgaatctcaaagaactatttcgggttggtattataagaatgccgtatagaggagttcgtttagttgcccgaaaggtcgaccggttttcgtcaaccttagactttgaggtaactccttgtactcttaaaccagcacaac

SEQ ID NO: 2105 - DNA, 360 bp, Cyanidium caldarium
  Clone ID: LIB190-042-Q1-E1-F5
agtatgatgcaggcaaagaagtgacgcagtagatcagagagtaacacatgcaagtaggtaaagcgaacgggtgagtaaagaggtgtgaaagagtggaagaacatgaaagcacaggagaatgtaagaaatggttagagtaaaaaccataaaggaagtaaaagcgggaatctgagaggaggaaagccacattggcactgagaaaaggtccaaacaagagaagtcagcagtggggaaaattgggcaatgtacagggaagtatgacccagtaatgaggagtggagtaaacagaacaggaagtaaaaggacggaatgaagggaagttatggcaaaaacacgtgccagcagcaacggtaaaacgtg

SEQ ID NO: 2106 - DNA, 430 bp, Cyanidium caldarium
  Clone ID: LIB190-042-Q1-E1-F6
accaaagcgtatctccgtttcctggaaagcctttgggtttacgttgctgtaatattcaacaaaagaaatactggataaaacagagatacaataatatagtagtatttcaagtaatatgtgcagctaattcgaaacagtctttgtaccgaattcgtcccttgcaacgacaagtaagaaatagttgagtttacaaatatttgcaagcaatgttttcatacacatcctccatggaagttgttactgcgacccatattctttttggaaacatttcttggtctattgttgttgatgaatataaaagaatcgcaagatgactcgcttgatcaagttctcgtggcacaagaagagacaactggcaagtatccatttctaggtcgtttagtgggtgttgttcaattgtccactattcccaaatgctctcaagttttcc

SEQ ID NO: 2107 - DNA, 366 bp, Cyanidium caldarium
  Clone ID: LIB190-042-Q1-E1-F7
aactctgctgtatagaagacgtagcattacagttgcgcaagcagattgaaagggtttctggatgtactgcttctataggcattggttcgaacaagacattggccataatatcatccatgaaggcaaatcctaatggacagtttacgatctggtcttcggaagctatcgaataattatcattgttgccagtggaacatcgtcctggtgtcggatggataactcgacgtcgcttatagtcgatgaatatatttacttgtcagcaactacgggaactgtctttagaaacgttagatagagagtttggacgacatacagctcatgctctttatcaagcttgccaaggaaaggatgatagacctgtggaaa

SEQ ID NO: 2108 - DNA, 206 bp, Cyanidium caldarium
  Clone ID: LIB190-042-Q1-E1-G1
acgacgcgtccaacatgcatgatcaacaatgcaagtagcatacgtcgtttgatgcccgagacacggaagcaacaactgcttcttcaactattgctggtggatgaagtggtgactttcatacatatcgcaggttgacaccgacagaactggaacgcctatcacaactagacatggaggcacaggagaaacatgaaaacgagatattt

SEQ ID NO: 2109 - DNA, 406 bp, Cyanidium caldarium
  Clone ID: LIB190-042-Q1-E1-G10
ctacagtaatgctggacaatgggtatacactatcacgtggaaagcagagttttgtcgtcttcgagaagaactgatgagtgtaaagtattagaagttcattgtataaagcttggtatgcagtcatgagtggcactctgtgtatgaaggtacacacctgtttcatatgggaactatacctgataaaagcgggtatattcaggtttttgatcttcgaatgatggtctctggctcggaggatggatttaaagttgtaagactatatacgagacgggccgctaaaccactttcagtagagctcgattatggaatgaactcatgggacatgttaggaacgaacctcagtagtaaaatggatgatggcacctttggtagcgatacggtaagaatgctgttgaagggtttaaga

SEQ ID NO: 2110 - DNA, 376 bp, Cyanidium caldarium
  Clone ID: LIB190-042-Q1-E1-G11
aggacgcgtgggcggacgcgtgggcggacgcgtgggcggacgcgtgggttgttgggccttgtggtggtgatgccctggattgagctacgtagtggcaactccgctgtcttgaaagacataactgcaagtattgaaaagcctgacataaaatggataactaggacgaatctcagtacttgtctgaattctgcagaaggaaatgttacggttgacttgtcgcggcagtgtagcttgaaggatatattttcattgaagcttctcgacaataactttaagttggcgtgttttaatgatgccttgtttttagttttaccaggcttatcctttgttattactggtaatcgtatattctgtagacgctcggacttgaatgaaa

SEQ ID NO: 2111 - DNA, 450 bp, Cyanidium caldarium
  Clone ID: LIB190-042-Q1-E1-G2
ggtcgacgacgcgtccgcccacgcgtccgcccacgcgtccgctttgtgggagaaatgtttgaagccttgtgacttgggattctctttgtctgtcttcgtgggcaaaggtcgtagctaacttgcgcaacttgttgttttttatgcactagaatggaagtgtcgtggtggcgtcttttgggttggccctcggaagatcaaccactttcgcagtatattgtggtcaaagactgtgctttatgtgaggggacaccttttttacaccagatagctgcagcatacttgcgaaacggatttttcctagtctatctgtctgcagagacaccatggtattccctgtacttaaatttaagaaagctgggagtacgtttagattctagccaaggtagaaaacgcatattgttcttcgatgcggccgacccatcggaaacgaacagcaatgaagactaacca

SEQ ID NO: 2112 - DNA, 426 bp, Cyanidium caldarium
  unsure at all n locations
  Clone ID: LIB190-042-Q1-E1-G4
gtcgagggacgcgtcaaggttgatatctatttgagtggtgttagtcataatatgcaagaaattatgaaaacgctgactattataagtaccatatttattccactaacgtttatggctggtgtatacggaatgaatttccctcgaatgccagaattacactatggatatggatatactatcttttggtacgattgttgttgaggagtttctcgtacaagtatatacatgattgagaacggaacataggttgatggcacttgtcatagttgggcttgaaatatttatttttcgcaaacgaggttggatangaagttgatgtatgctgcagatcgaattgtcaggagaactacgctggcttgctctttgctcctggaccacaaggaacaaactccatcagctttaccgcataaactattgacttgaaac

SEQ ID NO: 2113 - DNA, 382 bp, Cyanidium caldarium
  Clone ID: LIB190-042-Q1-E1-G5
acggaggcagttgcaactgctctgtattggttagaacaagatgaagcaaaagggtctaagatttatcatactattagaaactgcataagaaaattttgtgaaaaacaaatgcagtacatctccaaagactccgtgagacatcgacgtcaaaatcaaggttatatagaacaattgtatgagcagtggcaaagctaaagctagaaaaagggttagttttccggttcttgttcttttctactgggacgttctctactatgacgcctatgacgacttgaggaatgccttccatctctacttgagcgtctttctctactggaccttcttctatggctcgagctcgatctccttcttctatgatgctcgggagaacgactttctcgtc

SEQ ID NO: 2114 - DNA, 422 bp, Cyanidium caldarium
  Clone ID: LIB190-042-Q1-E1-G6
gggccgacccaaacgtccacgttcatgaatgtatttttgcgttcgttgattcgtgcactggcctcccttgtgtttacttactacagaatttcgccaaatatgggggttgaacaagctttgcccgtggcttgccctatagtaagcgaagttcttagttgttggcaagttttctgtaggagacctgactggagtctgggactgacgactctgactgaaactccaaataattttgtcaagtttcagtcgtctcatgtgtttacttttctttgttttgcgtgagatcgcagtttctgcgggagtctgacccggtgggagagacttcagcttctctttacaggaatactttgccaacttgttgttatttgttttgcttgaaagtaaatataaattgcatttgtttggaaaacaacatctacgttcac

SEQ ID NO: 2115 - DNA, 390 bp, Cyanidium caldarium
  unsure at all n locations
  Clone ID: LIB190-043-Q1-E1-A1
gcgtccacccacgcgtccgcacgatagcgccgacgacaagacggattatagaaagatagtgctctccagtgtttggttttgtgatggggcgtctcagtggcagccataaaatanagtaataatttggttattcggcctaaatacagaatgagtaggaatagttggaggtaccaaatcgtatcctgagtaaatcttttctccacttgagaagatgtcctggaattatagaaacactagctcacctctatttcgggttcgtctgaattgcgcaactttaaacaaatatacttctttagctgtcttacagtgatatccgggtggcactcttaagaacggtttttgtagggacggcagattagagccctggattggtgaaagctgtaacaaaca

SEQ ID NO: 2116 - DNA, 76 bp, Cyanidium caldarium
  Clone ID: LIB190-043-Q1-E1-A11
gaaacagccctcatcaccctagacatttccactgggctcgcatagggataataaagataggttgaaaattttttgt

SEQ ID NO: 2117 - DNA, 209 bp, Cyanidium caldarium
  Clone ID: LIB190-043-Q1-E1-A2
cgcgtccaactatatgacgcaggcatacaagtgacgcagtagatcagagagtcacacatgcaagtacgtaaagcgaacgggtgagtaaagaggtgtgaaagagtggaagaacatgaaagcacagaagaatgtcacacatggttagagtagggcccatggcggaagtaaaaccggaaatctcacaggacgaaacccccattggaactgag

SEQ ID NO: 2118 - DNA, 72 bp, Cyanidium caldarium
  Clone ID: LIB190-043-Q1-E1-A3
ggtcagcgaggtgaagtgagtagagaaataacaaggatacttgtgctagaaaataaaggggtcttttcttgt

SEQ ID NO: 2119 - DNA, 305 bp, Cyanidium caldarium
  Clone ID: LIB190-043-Q1-E1-A5
cccacgcgtcgaccggatgcattgctcagcgatgtgaagtaaacgagtggtttgtgaaaatacaacgaataagagaaggtcgggaagctttcaagtcatttgcccagtgacacgtttctcgtggttagagtgtgtcctttgaaaatttgaggaaaaggacatagttttggttcctagcggtaagcagtacttgttctagaaattttgtaagtttatactttggctattcttttatagacacgcttaggcaagcttgtatgtgggacactgcttggaaaggcatttggaaaacttaggattgcctc

SEQ ID NO: 2120 - DNA, 392 bp, Cyanidium caldarium
  unsure at all n locations
  Clone ID: LIB190-043-Q1-E1-A7
acccacgaacgaagctttaaacaaggagaaatttggagttaatagcacattcaaggaagaactatacactaccaaacttgatcgttcggctcccgattttgatgaaaagttgcgaaaggccgaggaaatagcacagcaaattcgaagagcggaaaccacgaatatccacttgaaggaagaaagaggacaggaattggaaagagattatgatgaggaattagtatatggtgcagtggttcgtgaaagtgacgctggagaattgaatcaaaagtatgacaatcaaaaacccgatggaggctcttccttgtcggtgttganacaagaagggtcgaatggaagtgcagctgtttctgtagaccctatccccgtctccgattttcgacaacggacca

SEQ ID NO: 2121 - DNA, 394 bp, Cyanidium caldarium
  Clone ID: LIB190-043-Q1-E1-A9
aatgtaaagtatagagtgtgcggcctgccaaatagtatagaagaaatcgatgaaagtgatcgccaatacaagatgcggatccatcgagcaattctgaggataatggtgaagtcaaacaagaaaatgatgaacttaattcacaagcaactggagaagaagatgcagaggatatggaagaaccttggacctatttgttggagcaaattgcggaggcagaaaggatagagttgcactgtggttggtccaaggaggatcgacaaaaccttcttgttgcgttgaaagagacaaaacaattagatgcaacagtcctttcgcaacatgtgaaaagcaaaagccctgaggaaataaccgaatatctaaaagtattaaaggacagacttgggaagaaagatga

SEQ ID NO: 2122 - DNA, 405 bp, Cyanidium caldarium
  Clone ID: LIB190-043-Q1-E1-B11
acgcgtccggacaatgtgaaactttccactttattggatctctttgcagagtatgccaagttggataacttgttttctctatgtgaacaaaagtttttggaaatgcgtcgaattgcacgcctgttacaacaagcgggtactttatcgttgagagaacaatttgagttttgccaagctcctgtaaaaatttcggatccatttcttatgaaatacttgttaaggtaaataagaggctttgggacattttcttggaatcgataactcgtgtagttttgcaaagaatgttgctgcaggcgttcgttcggaactcaccatccgtccgtatcgtggcaaattactgacacaacttgatttacacaagttggaaagtcgatatcgagtatttgatttgtatagctacttgag

SEQ ID NO: 2123 - DNA, 355 bp, Cyanidium caldarium
  Clone ID: LIB190-043-Q1-E1-B12
aagaacaagaactgagttgacgatataaaaggaagaacggaccgagttttacaagtcgatattgctggagtattcttctctgccgttttttcaggagttttgatgattcctgccttttttgcgttcaatatgttaattccaatagagcatttgaggaacggaagtacttattttttcattgcggtagtaattctttgtttcgtagctattgctgttctggccattctgtatgtaaggtggcttaaaggaaatgaaagaatgcgacttgagttgctgttgggcaaggagaagacagcaacaataacaggaacagtgaatagttagaaaggttgatgttcgtagatattcactactt

SEQ ID NO: 2124 - DNA, 246 bp, Cyanidium caldarium
  Clone ID: LIB190-043-Q1-E1-B3
acatcaaatgctcaaacggaggaaagaaagattcttcaaagaaagaagccacaagtaaacctgcagcagcagatgctacaaagacgacagaaaagtctggtccggaagccaagttgaagggaactggtgcaaagaaacaataaaaagttgactatgcatgttcctgttatgttttgtgagttctgtttgatagtttccagctattcttttggtagtgaataaagagaaaattttttagatttacac

SEQ ID NO: 2125 - DNA, 294 bp, Cyanidium caldarium
  Clone ID: LIB190-043-Q1-E1-B5
cccacgaaccaagggggcgagttgctcgctataaggcctccatacttcccttatggtcctcaaaatagttttatgcgaaagtctctcatctatttgcaagtatctatgattggacaagctcttatcttctgtactcgtgcatactggatgttctttatggatcgtcctggtagcttattgatgggtgcattttgtactgcacagactcttgctagtttcttatcggtttatgccaagtggggctttacaggtattgacggagttgggtgggggtgggctgcaactgcctgggta

SEQ ID NO: 2126 - DNA, 381 bp, Cyanidium caldarium
  Clone ID: LIB190-043-Q1-E1-B6
gacccacgcgaccagcttctcctagtacggaagaagttttactgtctgtatttcagtttttagaaaaagtaacagaatatcccagcagtgacccacataaagctttggcactcgttgtacacggtattttgttaactcacggttttcgtccttcagaagaagaaccacctgaaaacgtggataactggtcctttgcagttgaaaatgcgaagatacccaacaactttgaggaaaataagtatggagggagttatagacactacagaagttgtatgacgtttgaaattcgaatggtacctctgagcaagtttgtgggtgtcaacgcagtagccagtgatatggacaaagtattttattcggagctcagactgggaaaatatt

SEQ ID NO: 2127 - DNA, 94 bp, Cyanidium caldarium
  Clone ID: LIB190-043-Q1-E1-B7
gtccgttgtcgactcaaatcgcattatgtcctctcatctcgttgtggcgttcctaagggtactgtctgattggattggactgcaccgcgggcga

SEQ ID NO: 2128 - DNA, 397 bp, Cyanidium caldarium
  Clone ID: LIB190-043-Q1-E1-B9
agaatagtaggcggtgatggattggaagagacaagctgggtgaagtagcgagacaagagaagggaagtaaaaggtaagaaagaggaaaggtttacgagagaaggaagtagaaagaagagagtgtaaggcggcgtcataatagaaatccgaaaggagtagaagaaaagagagagaagaaagaaaagaagagaaaagccgtactgaagaccgacacaggtactcgaggagaaaggagacccaaattaaggtgagagaatggacgataaggaactaggcaaaaggatatggtatctgcggtagaacatatgaaagaagcagcaccgactgtttagcaaaaacacgtgccagcagcagcggtaaaacgtgtgtagcaagcgtagagcacaagaactgggtg

SEQ ID NO: 2129 - DNA, 265 bp, Cyanidium caldarium
  Clone ID: LIB190-043-Q1-E1-C1
cgcacgcgaccgatcgtacgcgtggcatgcattccacttgccgatgggtcattgcgctagcttctgtcgggttattcttccagtttatttctcttatattccatctcatctctcaattggcaaagataccgtttgattgggctgtggaagcagttgtaaactttttcatgatgtggtggtggtttgctggtgctttgagtgtgatgatatcgaagcctactgcccactttcagcggggatatgattttggtttggaagttagtac

SEQ ID NO: 2130 - DNA, 381 bp, Cyanidium caldarium
  Clone ID: LIB190-043-Q1-E1-C3
cagagatctctagagaaaggcaagaaagaaaagaaaggaagacacagtaaatgaggcgagaaagcataggaagtgaaacggattaggaacccgtgtagtctatgcagtaaaagaaagaatgagtaagaaaaaagggagtcattccaccaggggagtaaaggcgcaagaaagaaacccaaagcaattgacgggaatcggaaaaaggggtggatcacgtaaattaatccgataaaccgagaaccttacctctccaagaaggtgttgcacggctgtcgaaagaacgtgctgtgaagtgagagaacgtacgagaaagccaagtgaggaaaagaaggcaagtagagggcggcccgagaaaagaagggcgtaagacgtgatacagag

SEQ ID NO: 2131 - DNA, 183 bp, Cyanidium caldarium
  Clone ID: LIB190-043-Q1-E1-C4
cgcgtccaaccaacgaccctgtcaatcttgctggtatggtcgctgcaaatactttacgtggtgatgttcaacagacgcacgggcttgagcatgaagagtggttaaacgtgacggagacgggcggggttcaagatgagaaatgtagtttaggcgatgtgggaaatcctgaggaagtaccgtccg

SEQ ID NO: 2132 - DNA, 358 bp, Cyanidium caldarium
  Clone ID: LIB190-043-Q1-E1-C5
cacgcgtccgcccacgcgtccgcccacgcgtccgagacgtcaaaatttcccatcgcattgtgaccaactcggcgtcgtcgtagtacattcctttgggcatacttgtacaaccatgaagtacttggcagcttattttttggctaaaatgggaagcaaacaaggcaaacctactgcagatgatgtgaagaaaatattgacttccgtaggtatcgaagtagatgaaggtcgtctcacgcaagtcgtggaagctttgaacggaaaagatttgaacgagttgatcgaacaaggtttacagaaaatgtctacggtgccttccggtgccactgcagctgttgcagcagcagttggtggagcagct

SEQ ID NO: 2133 - DNA, 376 bp, Cyanidium caldarium
  Clone ID: LIB190-043-Q1-E1-C7
cagtttggagataggttacgtgtcatggatgcccttgcagataactttgtggaagaaatggaagcttgggttggagaaaagcaaccttttgatgttatcgttgccaacttagttcttcatattttaccaggaaacaatgaaaaatttgttcaacatgtgtctcgtctcttacgccctggtggtgcatttttgggccaaacttttgcagcggaggattcttttgaagaagcatatgagtttggaattcaacgcagagcagtgatgcatagtccagtgtccattgcatccatgttggctcgccataatatccatcccgttcatgtggatacaaagagcagattaatagacgacgaagatttcaagtggatcgaaacag

SEQ ID NO: 2134 - DNA, 389 bp, Cyanidium caldarium
  Clone ID: LIB190-043-Q1-E1-C8
cccacgcaaccaggcggatgtttattatttggaaccgatgaaaagaaaagagtaagttttggggattgttgccaacgatatagctcaatttggtaattatgaggaatgaaacggcagcggagtttgcgaaaagagtgaagcaagcaatcgtgcgtcgaataggcttgatagatgtggagtgggatggattcttgaagagacatcgaatttcctcaaagtttattcaacaaagacaaaaggcacatgcaatggttttcttgcgtcgaatgcagcgaaatgcagaacattcgcaggaaagaggttttgactcttccgtagacttgagttcgctatccacagcctcttctccagccatcgtaagaaagaggaaagccaaccacacgaaaggg

SEQ ID NO: 2135 - DNA, 406 bp, Cyanidium caldarium
  Clone ID: LIB190-043-Q1-E1-C9
cgtccaatggaatgtttggaatgcaccaagttatgagcaaccaagtttgtgaagcaagtgtggagttgaaatatttagaggcagtagagaatgtacaggaaatatacaaaaatattccagagagtgatctattggagttgtatggtctatataaaagaataaaggatggagaagctcctttacagaatcctttctatttctatcaatggaaagaaactgccaagtggaagagttggaaggaggcaagtaataagtattcaaaagaggaagctatgaagaaatatattgcactgagtgaaaaatatcacaagaaagattccaatacaagttatactgggaaacagcctttaggtttcgagttgcctaacagtgaagaagagcaatcccagaaacctgttttggacct

SEQ ID NO: 2136 - DNA, 234 bp, Cyanidium caldarium
  Clone ID: LIB190-043-Q1-E1-D1
ttttcggataagtagctgtggtcacagtggacgacgtcgtttgtgttttgcttgtcattgttgtccagtggttccatggcgtttcacttgttacgagtgaagcgtaaaggtcgtttcttgaactgcacttgaagccaaggcgagtttaattgacgggagttggaaaccacgttgttgcaaaattcttttcaggtgggtatttagcatagtttgactacggtgtgaaggcagttg

SEQ ID NO: 2137 - DNA, 378 bp, Cyanidium caldarium
  Clone ID: LIB190-043-Q1-E1-D10
tccgcggtttttgagaggtggcgggcatggcgcatgtaaatatgtgatggctttggcttctatcagcttgattttagttttctttctttggttggcctcctttgtcgacgcattgtatccaattcttacaaagttctggtttgtggagcttggtatcaacatattccttactatgtggtggttggttggtgcaattgtggtgactgcaaagcgaccttctagtgttgttatggatgcgcttcacataaccaaagatatcaattcaatcgatggcctttcatggatcaactttgcttttacgctattcctttgtggagtagcagcagttgacggattgttggtgggagataagaccagcagctccggcaaacagaatac

SEQ ID NO: 2138 - DNA, 386 bp, Cyanidium caldarium
  unsure at all n locations
  Clone ID: LIB190-043-Q1-E1-D2
cgcgtccgacagaagagcgcgatgtacaacaagcagcagcatctggatccacacgatgatacaagtgcacaaagaccagactttatgccgtatcaaaataatggagggacagtagtagctatgggaggggaagactattgtatcgtcgcggcaacgactcgtctaggtttgggtttcgctattcctacgagaaacgtttgtcgatatgccatcttaaacgaccgcgtactgttggcaactgctggaatgtatgcagacaccgttgccttgcacaaatttgtaacagctcgagtcaaagtgtaacaacaacaccaaganaaaccttttgggttattctccgctgcacantttgtatccactactttgtatttcaggagattctttcc

SEQ ID NO: 2139 - DNA, 322 bp, Cyanidium caldarium
  Clone ID: LIB190-043-Q1-E1-D3
ttcgtcgaccgacgcatgcaacgtactatacgaagaagatttgaaagacgtatttatattcctctaccaaatgttcaagcacgagaacgaatgtttcagttgcatgtgggaaatacaccgcatgagttgaaacctgaagatttccacgaattggctcttttaacggaaggatattcggggtccgatattgctattttagttcgtgatgcaattatgcagcctgtacgtacctgtcagaatgctcaagcgtttaagaaagtgaagaagccgaagagtgctacggacaaagcattaacgatattctatacaccctgtagtccag

SEQ ID NO: 2140 - DNA, 284 bp, Cyanidium caldarium
  Clone ID: LIB190-043-Q1-E1-D4
cgcgtccaaggacgcgtgggtgaagaccacaaaggaagcatctccggccgtctttctttctttcgtttcacatgtagggttttctgtttgcaagattaaactgtcgtgtagtcgctcagtgacgctgttgccttgttctaagaatgggttgagacttgggaggcgttcaagagccaaaggatatgaccgcattgtatccgcggcattggactctttttccctgccagcgcctgaacatctgaatggagctgagaactacaagtatggggatcagcgtaacttga

SEQ ID NO: 2141 - DNA, 370 bp, Cyanidium caldarium
  Clone ID: LIB190-043-Q1-E1-D6
acccacgcgaccacccacgcgtccgcccacgcgtccgcccacgcgtctgaagtaatgccgacgcagtcccaactacgttccttaggtcgactatatttgtggagaggcatcgctcagcatggaggtgctactgcggtagccaaaaggttgggatggaaagtgattttgaaaccttacaaattttggaaatcttttgagcatttggaacgcgaactgattgcatttattgagcattctcacttacctcgagtcatgccgacgcaggagacattgcgataagctggtcgttaggatattattcatgccatttacgttcatggacgctcggatgaagttgcaaggcattttaatttgccttacaatccgactc

SEQ ID NO: 2142 - DNA, 384 bp, Cyanidium caldarium
  Clone ID: LIB190-043-Q1-E1-D7
gagaaaggcaagaaagaaaagaaaggaagacacagtaaatgaggcgagaaagcataggaagtgaaacggattaggaacccgtgtagtctatgcagtaaaagaaagaatgagtaagaaaaaagggagtcattccaccaggggagtaaaggcgcaagaaagaaacccaaagcaattgacgggaatcggaaaaaggggtggatcacgtaaattaatccgatgtaaaccgagaaccttacctctccaagaaggtgttgcacggctgtcgaaagaacgtgctgtgaagtgagagaacgtacgagaaagccaagtgaggaaaagaagggaagtagagggcggcccgagaaaagagaaggcgtaagacgtgatacagagtaggaagaaaag

SEQ ID NO: 2143 - DNA, 387 bp, Cyanidium caldarium
  Clone ID: LIB190-043-Q1-E1-D9
caattcgtattgcacagtggaattggatatcgacggctattatggataacaaaataggaaagcgtggaggtactttgaaagacgtttcagcaccagacttcattgcaagttacgcaaactttttaaaacgcaccggaaacgtggaactgccatcatgggtggattatgtgaagaccagtacgaggaacgaactagctccatatgatccagactggttctacgtgagaatggcagctctcgctcgtcaaatctatattcgtccaggtagaggtgttggtgcattccgacgggtatacggtggtcgaaagagaaggggatcgaagcctagtcacttcgcgttggcttccagttcagtcatccgacatgcacttagacaactcgaaaagt

SEQ ID NO: 2144 - DNA, 85 bp, Cyanidium caldarium
  Clone ID: LIB190-043-Q1-E1-E1
acccacgcgatcaaacatcagcgcacgcgtttgcccacgcgtccgggaatgggttgcgcattctccacgcagctgcaggggccta

SEQ ID NO: 2145 - DNA, 423 bp, Cyanidium caldarium
  Clone ID: LIB190-043-Q1-E1-E11
acccaacgtccaccacgcgtccgcggacgcgtgggagcgaattgaagaaaactttgcttgtgactttgtgctgaaacctgaaatgatgcagcaacttgcgaaattggataaacagcaagtcgtttgtgataccaaagaatattggaatttggctgtgaattcctagtttttgttcctaaaaaataaaaactaaaatgtgtcgtttacatcgttaaaaaaaaaaaaaacaaaaaaagaacaaaaaaaaaaaaaaaaaaaatacaaaaaaataagaaaaaaaaaaaaaaaaagaagaaaaacacaaaagattaaaaaatattttttaaaaaaggggggcccccccaaagggttcaaatcttatttacgtttcaatcaaagttcaaacctctccaagggggtccccaaattcaattcaaggggccg

SEQ ID NO: 2146 - DNA, 407 bp, Cyanidium caldarium
  unsure at all n locations
  Clone ID: LIB190-043-Q1-E1-E12
attggntccccacaaactctgtcggttggtgaatagtttggttcgaatatttatcggtgaagaaaagttcgaaaagatggaaacaaaagagagcttggaggaaaaattttgcagaatatgtcacgatacagatcctaacgagcttattcgaccttgtgactgcacaggtacgttggcatatgttcacagagagtgtctccagaggtggctgcagcaagtgtccgactacaagtgtgagatatgtggcaagcagtaccgttgtaaaaagaaaactcgctcctttttgagtttcctctttcgtaaaggagcttggcgagaatggctgcacttgggttacgtcaccttttttgtcaatcgaatttggagccaaactggagttctgttgcaaattctgaaactaagacaac

SEQ ID NO: 2147 - DNA, 127 bp, Cyanidium caldarium
  Clone ID: LIB190-043-Q1-E1-E2
cgcgtccaaccaaccgtccgggcggtgctttccggaatgcttaggtttgcactagcctatacttttcttgccccccctgtgggtacacgcaggctatgattgggcgccttcgctgtgttgtttgtgg

SEQ ID NO: 2148 - DNA, 375 bp, Cyanidium caldarium
  Clone ID: LIB190-043-Q1-E1-E3
cgcgtccaatgaattcttcgtgggtttgcgtctcaagatgtcttttttgaaacgtatacagtcgactctgctttccaacagaaactcagtaacaaagacaagtaaggccaattacgacataaagcacgttcgggtttaccgctgggaccctgaaaagggagaagaacctaaattggttacctactcgattcctctcaaagaatgcggtcctatggtgttggatgccttattcaaaataaacaatgaagtggacgctacttttgtatttagaaggtcgtgccgagagggaatttgtggaagttgtgcgatgaatatagatggaaaaaaccgtcgggcttggttaactccgttagcaggaccgaagcagacagtgac

SEQ ID NO: 2149 - DNA, 198 bp, Cyanidium caldarium
  Clone ID: LIB190-043-Q1-E1-E4
tgcaggcaagtggagcacagactttttcagacatttgagggttatgcctcctcctcctcctcctccgcaatcttctatatcgacgaccattactggaaaagctatttgtagttatgtttctgcgctattagaagaaggagatcgcgtattgaatgctattggaaagcatacagttcctagtggtatttttacacagga

SEQ ID NO: 2150 - DNA, 375 bp, Cyanidium caldarium
  Clone ID: LIB190-043-Q1-E1-E7
cacgcgtccgcaaaagatcaagcagcaacaatgtactatgacagtctctgaacaatacatacagcccgatacttgctacaagtatgtccctgaacaacaattggtgcctcatacttgttacaagtattattctgtacccaagtttattgaaaagtgctatcctcagtatgcaacaacggagaaatgtgtagagtatgagtaggttccatatgccacttctacaccttatccatcggtatctccaagttatactccttcagcatatcaaacaacttctgcttattaaagagccgaagactggatagatttttgaagtgtctcgtgttcaaaggaaccatgagacataagaaaaagtaaacgatttggttttatgta

SEQ ID NO: 2151 - DNA, 373 bp, Cyanidium caldarium
  Clone ID: LIB190-043-Q1-E1-F1
cccacgcaaacaagcgtccgcccacgcctccggatgacgaccgttcatgcaactactgccacccaaaagacagtagatggaccttctcacaaggattggagaggaggaagaggaattttgaataacattattccatcttctactggagcagccaaggctgttggtaaagttattcctgaactgaatggcaagttgacgggtatggctttccgtgttccttgtccggatgtttctgtcgtcgatgtcacttttcgtttaaagacaccaaccacttatgacgatatcaaggcaacgatgaaagctgcgtcagaaagcaaagctttaaagggaatattggcatataccgaagatatggtagtttctactgactttg

SEQ ID NO: 2152 - DNA, 427 bp, Cyanidium caldarium
  unsure at all n locations
  Clone ID: LIB190-043-Q1-E1-F12
ctcaccccatctagtagaagaatatgttggcgtttacttgtctcacagactgtcgttggttagagacttctcgattctccagatgtgccaaagccaataccgtctcgttgcgacgtagttcccagtgttcacactcttggaggagtgtttcgatgaactacagtccctattcgataactaccgacaaatcagaaggacatattgttcccggtactttttcaagatttgagtttcttgaaggtcgagtcaccggtccaaccgtcttgaaccctagcatacttgactttacagtgtctaatgtttcagatgctgcctttggagaatggagagcattatcggcttcaagtagagcanaagaactggaacacagaagaaacgttcacaaagcgacaatagaaagtctcaagaagactcctaccgaaaagtc

SEQ ID NO: 2153 - DNA, 223 bp, Cyanidium caldarium
  Clone ID: LIB190-043-Q1-E1-F2
gtccgcccacgcgtccggaaagaggcaaatacgggaaagcagtaaaagaagaaagagaaaggaaaaaactgagtatcaggaagaaaagagggagtagatgaggaaagaaagatcaaggaagtaagagtaagagaaggagtaatgtgaatgaaagcaggaaagtatttgaagaaaagagtgtaaagcgcgtaccttttgcataatgtcgcagcgagtgaaagag

SEQ ID NO: 2154 - DNA, 365 bp, Cyanidium caldarium
  Clone ID: LIB190-043-Q1-E1-F4
gcgtccgaccaagcgtccgatcttctcgttggatgctacctctattagaacatttgcgaacgtcttatttcaagttgaatccatctatgccatccacttttcatgttggagagactcttcagaagccacaattgtgtcagattgcacaagctttgttaacagaagcggataaaattctgtattctgtttatcgtcatgtaccagattcaggtatgttgacggaagaaatcaacaggtatacgggattcgaacaaggagcagaaaaccttacatggagttatgactcgtttgttactgcagtctggagcaggaattattccttgaacacttttcgtagtaattgggttttggggtagttttttttg

SEQ ID NO: 2155 - DNA, 303 bp, Cyanidium caldarium
  Clone ID: LIB190-043-Q1-E1-F5
gcggacgagtgggagcggattgacataatattagcctgcgacattgtgccgtttccatgggatgtggcaacagcatcatacattcggatatcatcatctcgtatagtgatgcgacaaccactggaaatttcgctgtttcctcttaatttttctgcgaaagactattcactactgtgtgtcgaatacatacttccaaatattacgaggagaaaagttggttcgagcatctttgtcatggatagaaactctaaaataagcaccaagacactgaagaggcatctttcggatacacgagacttgggc

SEQ ID NO: 2156 - DNA, 300 bp, Cyanidium caldarium
  Clone ID: LIB190-043-Q1-E1-F6
agaggaggaggcagaggaaatagtcgaggaggcagtcgcggtggtagttttcgaggtccaatgaatgataatagacaggaaagagatgcttcacaaggtttcgccaactctgcgaagcgtggtgggagagaccggacaggtgataaaagtgcgactacgagaagagtgacggaaactagtagaggaagaggaagtggaagagcaggagctccattccgtggaaacaacggaccgaatgagcgccctccaagagaaaggaatattgggagaaacgacaggaaacctttctctagaaatgat

SEQ ID NO: 2157 - DNA, 395 bp, Cyanidium caldarium
  Clone ID: LIB190-043-Q1-E1-F7
acccacgcgaccacccacgcgtccgggtgtttgttggtgctgttagtcttcagtggtgagcggatatgtctctgacagacatcctgtattgggtggacccagtagtttggagcaaacgctttgaccttccactatctgttacttgcttctttatatatttcatagtatttcatatagcttgtgccttctttggtattgctgactattggaagcttctgcgcaagtacaagctgcacgaaagtgacgagaagacctacctgcagttgctgccaagagttgtgttcaatcaactggcgttttacttgactagttgctacataggagagaaaatgggttggatattcagaaccccttctaaagacaatgctttccaactctggaagttgcctatctat

SEQ ID NO: 2158 - DNA, 296 bp, Cyanidium caldarium
  Clone ID: LIB190-043-Q1-E1-F8
accttttcagttattgcaagattccgccagcagtgaatcagattgaaatgcatccgtattatgcaagaacagatctgctcgaattttgtaagagtcgtggagttcatgtgactgcttattctcctcttgggagcggtaaacatggtccgcttcaagatgagacagttgcaaagattgccaagaaacatggaaggacacctgctcaggtattgatccgatggtgtctagaacgtgggtgtgccgttagtccaaagagcgtaaagaaagaacgtatcagggaaaactttggagtttta

SEQ ID NO: 2159 - DNA, 371 bp, Cyanidium caldarium
  unsure at all n locations
  Clone ID: LIB190-043-Q1-E1-G1
cacgcgtccaaccagcgtccgtgatgatgcgccgagtagagacgtgacttggttggttcagatcgtttggaacaatagaatcttgtagaatttttggcttttttggtggtttatgtgctgttttgtgactaaagtgtctgtactgaatatctgctgttgacatgaagtttgggaaaaagttacaagacgcagtggaagctgcanacaaggattggaagccgtactttatagactacaacggtttaaaaacgttaattgctacgagtgtggtggagtacaaagacaaggaattcagtggtggtgtggtggaggaagacaaagaggaggagagtacgaaagaggagcagacggcggtgaatggagaaaatatc

SEQ ID NO: 2160 - DNA, 288 bp, Cyanidium caldarium
  Clone ID: LIB190-043-Q1-E1-G10
ttgcagtagcgtggatcatagcggtaggttgttcacatttgacagtttaacactgtaaatatcgcatgaatgttcatttgtacatcagtaacactttcttagaaagagatcaaaggttagcaggtgacgtcactgcggatatcgccacagacatgtgtgctctttagatatctgagtgcatttagcgtcgcaattgtgttccgtgtgagtcatggtaatcacagtacctcatcagtatggctgtcaatgcgtccgctatagatctcactgcaatgctagcggtaaaac

SEQ ID NO: 2161 - DNA, 325 bp, Cyanidium caldarium
  Clone ID: LIB190-043-Q1-E1-G2
cccacgaatcaaatgcagcaatttcggctaattgttgtggaacaagataacatgtcgacccaaaacgcagtaggctctgccaacttgagaaggagaaatacggcttcacgcagttccggtttaactagttctggtacgagcacctcgaggaattatttttccgcgcgactgtatagcgacgaagcacccggtttgagagtgggaccaacgtctgttatggtttttagctttgtctttataccttttgttgtagttttgcatgtgtggtccaagtttcgaggttgattagggaataatagtgaaattaaaagtacgacaaacatgt

SEQ ID NO: 2162 - DNA, 262 bp, Cyanidium caldarium
  Clone ID: LIB190-043-Q1-E1-G3
cgcgtccaagtgatttggttgtcattacgctccacgcagtgtgagttgtcgttgcgcagtgtttgaaagttatagtattacttattgttcttggttggcacactactgatggacgcagaatcgagagagaaatctgtttacctttccaagttggcagaacaagcggaaagatatgatgaaatggtacaagaaatgaggaaagttgcctcccaaaccgacgaaaacaccacggagctttcagttgaagagagaaaccttttgt

SEQ ID NO: 2163 - DNA, 214 bp, Cyanidium caldarium
  unsure at all n locations
  Clone ID: LIB190-043-Q1-E1-G4
cccacgcaatctacggtacccgctgtacttaggcatatcattctgcggnggacaagaaaccaactggaattcccctagtacgggcgagcgaagcgggaagagcccactatgagaatcctctttttctacggtgagaagaggagatgtgtttaggcaggacaagaaatatctgcggcacgaaaggagcacatttcctggaatggaatatcatgga

SEQ ID NO: 2164 - DNA, 356 bp, Cyanidium caldarium
  Clone ID: LIB190-043-Q1-E1-G6
tccaggcgtcgtcgatttttggttgttattctctcctttgacctatcctacacaatgaaaggttggcttcatcagtatagtattgttggaagaaagataccaacggaagaggaacctgaacccccaacgtatcgtctaaagattttcgcgccaaatcaagtcaacgccaagtcccgtttttggtactttctacgtaaacttaaacgagtgaagaaatcgtctggcgaaattctgaacatcagcgaagtgtttgaaaggaaaccgactcaagtaaagaactatggaatttggataagatacaagtcgaggtcggacactatcagtaggtatagggagtatagggacgtgacaattac

SEQ ID NO: 2165 - DNA, 281 bp, Cyanidium caldarium
  Clone ID: LIB190-043-Q1-E1-G7
cccacgcgaccatgtgtgtgtaacaactatcagcaccacaaaaagatggttcgtatgagtgtattagccgatgctttgaaatccatcgccaatgcagaaagaagaggaaagcgtcaagttctcatccgcccgagctccaaagtcatcatacgcttcttgcaggttatgcaaaaacacggatatattggagagtttgaatatgtggacgatcatcgctcgggcaaactcgtcgttcacttgataggcagattgaacaagtgccgtgtgatatcaccacgata

SEQ ID NO: 2166 - DNA, 373 bp, Cyanidium caldarium
  Clone ID: LIB190-043-Q1-E1-G8
gacgcgtgggatcgactgaaacgagatatgtttacgacgcgtcggaatacttggcccttgagagatatgtttggtcgactcattacgttgcctgaagtaacgagcaataccaaaatgtacctacgagactgttttgatcacatcatacaaattatcgatattttggaagtatatcgggatagttcgatgggtctcattgatatttatttgagtggtgcaaacaacagaatgcaagaagtgatgaaaacattgacgattatcagcacgatatttattccgttgacatttataaccggtgtatatggaatgaactttagttttatgcccgagttggagtatgactatggatatttctttttttgggtattggtga

SEQ ID NO: 2167 - DNA, 446 bp, Cyanidium caldarium
  Clone ID: LIB190-043-Q1-E1-G9
ccggtcgacccaaacgtccaaacaaaagttatgctagaacgaaaaaatctggatagcttatggacaaacgcaaagggaaggttacaaaagcagaagtgtccgcagtagcagatgttgacatgaacgaacaaaatggcctttatttcaatttataacaacttgtttgcaagtagagcagtatttcgtccacaacaagcaacagtttgtactttaactcaagagggatatccgaaaataatcatagctacagtacaaataagcaagactcctatgacatctgtagcggttgccagcaatggactagcacaatatgcaggatcagtaccacattgttctaataacaaaggtacaactgctccagctaccatggaaaaaatcactattaaaaaaagagcactggatacagttaacgcagctttgatgttaattggcacataaactaaaac

SEQ ID NO: 2168 - DNA, 365 bp, Cyanidium caldarium
  unsure at all n locations
  Clone ID: LIB190-043-Q1-E1-H1
aaccaagcgtccgcatttcttcttcttgttgttgttgtgtgaatttgtagtagtagaccacaaagatgaacggtgtagtatcttcagggaatatggtgtataacacgcttggaaaaagcggcttattagtatctaaactatcttttggctcctgngtcacttttaacgaacaagtggacgtcgaactggcttacagcttgatgaaaagagcatatgaactgggttgcaatttatttgataacgctgaaacttatgcagctggagcagcagagtctatcatgggggaggcttttcatcgaggtgtaaangagggcgtatggacaagagaagacttggtgtttactacgagaatattcttcggcgga

SEQ ID NO: 2169 - DNA, 373 bp, Cyanidium caldarium
  unsure at all n locations
  Clone ID: LIB190-043-Q1-E1-H10
acccaaactatgagtgccaagtggcatcgatcctcattggatcgtggcttggatcgttttccagtgcttggttggctatcttgtcttgttgatagattgactagtacagtctttctattgaatgagacggtgctaaattccccatccgtgtaaatattacttcttatgacggaggagataaaggattgcttcaaagaggcatctacatctacatcaaggaacgagaactatggtactgaatatgagtatgctagagaaaggaatacanagaaaagaacattgcctttcgattccaaattcanactaaagagaattgcactaaatgacataacgaatatatctcattctccttcagagttcatttcaagtgatg

SEQ ID NO: 2170 - DNA, 281 bp, Cyanidium caldarium
  Clone ID: LIB190-043-Q1-E1-H2
cgcgtccggcaagggaatatcacaactttaggcagaggtggtagtgatttgacagctgctgcgataggagctgctttaggttgtagtgaagttcaagtttggaaagacttggatggaatattatctacggatcctcaaattgtgtctggtgcagttccaattccctttgtgacctttcaaaaaccctttgaaagggcatatttgggacccaaggttcttcaccccattgcaatgcaacctgcaatgagatacaacgttcctattcgagtaaagaattctta

SEQ ID NO: 2171 - DNA, 101 bp, Cyanidium caldarium
  Clone ID: LIB190-043-Q1-E1-H3
aaccaagcgtccgggcagtcatcagaattatggactcagatttgcgatccgagtggctccctgcttagttcggacatgtccatggcttactatatagtcca

SEQ ID NO: 2172 - DNA, 376 bp, Cyanidium caldarium
  Clone ID: LIB190-043-Q1-E1-H6
tttgtagaagcgttggctgttgcataaagagctatgtcggaagagtcagacaacgaaggcgtggagatcaagttagagactgcacctcatgatcctcgcttccaaactactaaccaagccaagcactgttggtcgagatacatcgagtatcacgcttgtgtgaaacaaaaaggtgaagaggacagcgagtgtcaaaagtttaaccgatggtacaagtcactgtgtcctatggaatgggtagaaaactgggacgaacagcgtgccaacggtacctttcctggtcccgtgtagttgtactgttccacttgggcccttttggagtttaactgacctgttgtccgtattgtccttatggctttttttgttcaataaagtt

SEQ ID NO: 2173 - DNA, 206 bp, Cyanidium caldarium
  Clone ID: LIB190-043-Q1-E1-H8
tcaagtgaataaggtagattttttaccgaaagtatatgaaaaaattgcagccttattaagccaaaaaaatttgacaatcctagaaaagtaaacttgaaatttgcgtgacaaaaagaaagaaaaagggaggaaaaggggggagaaaaaaaaaaaaagggggggaaagaaaggggggagaggaacaaaaggatcaaaacggggggggg

SEQ ID NO: 2174 - DNA, 409 bp, Cyanidium caldarium
  Clone ID: LIB190-044-Q1-E1-A1
acaaatgcggagtgactaactattttgattgctgcttacaggaagctttggaatggcgactcccaactcagaagatgacagcgtttggaaagaaatattccactcattcaccagcagatggtcgcaaaggctaaaacgtcttccagagcttccttcgtatattagaagtggtgctgcgtgggagtcggtgacaagaaagttccatgactggaaagaggcagttgtggcaaatccttatcctgctgcagcttatgtggtgacttttggtgttctgtatgggaggcttctatggacaataagagtgtcaagaatagaagaggctaggatcagacgtacttttcaagaagtgaaggatcgacaagctcgagaaaaagcaatacaacagcttcgtgaacaaaaactaaactct

SEQ ID NO: 2175 - DNA, 421 bp, Cyanidium caldarium
  Clone ID: LIB190-044-Q1-E1-A2
accacgcgtccgggatggagtctcgtgtgacgtggatgctgttaaatactactcagtagtcaacgctgcagctgccatatgtaacgttggaaccgacgccaactctacgttcctgcttgggcaaaccacattacggagtgttctccgacacgtagacctggataccttacttgccaaaagagaccaaattggagaggagatgcgtaaagttctagataaggagacggagtcgtggggtatacgagtcagtaacgttgagatacgagatgtcgttttgccaaccgatatgatacgtttcatggctagtcaagcagaggcagagagagaacgtcgagccaaaattaatttcgccgatggggaaatttcagtcgagtcaaaagttggcagaagctgctgcggttatgcaaagggagccaatgac

SEQ ID NO: 2176 - DNA, 194 bp, Cyanidium caldarium
  Clone ID: LIB190-044-Q1-E1-A3
accaaagaaaaatcgacaaacagttcttggtatgccaaacgcttggcactagctagcatttatagaagttctgagttgtactggatttccgatacatcgcaaggccagaaaatgacaaacgcgtttattgcagaatggatacatacctgggataaaacggactccaacttgagtcgattggatgcaaaagcaaa

SEQ ID NO: 2177 - DNA, 367 bp, Cyanidium caldarium
  Clone ID: LIB190-044-Q1-E1-A5
aaccacgcgtccgcccacgcgtccgcccacgcgtccgcggacgcgtgggtaaattatggcggaccatgatcaagtggtagcgtacaagcgttcagaagaagaaaaatggagccaagcaagggaaaaaagattggaattaatccaaacaatggaaaaagggaatgcgaatggcccccttttcccaaaaaaaaaagctctattttccaatgtgctagattttgggaacctggcttggttccggagaacccactttgcaattacctgcgaaagtaagaggctattctgtaccttcaggagagaccacgggggaagtgggggataaattgttggatatattacgtccatcttatcaccaggaagggaaact

SEQ ID NO: 2178 - DNA, 406 bp, Cyanidium caldarium
  unsure at all n locations
  Clone ID: LIB190-044-Q1-E1-A6
aggaattgtttttctctactttaaagaagaactttgagtcgaacgaagcgtcatgggagtgcagtgtagttgaaaccgcagttgctgtttttatccagtattatgaacagtgtgtggaacagtactatctagcaagcaaagattatgagctacctggttattccaaagtaaaacagattcggagtatgattgaagatgttctacagatagagaaggaacttggaaatatgcgtcagactcttgttggcgttcggagtcgtctttgtactttcgaagctgcatcaagcagcgaaactcttgtgcaatggttgtatgaaagaaatggaatgaactcttgtttgtattcttgcttacaggtacgtactctgttgcgtaattttgacttggggaattttanagaagtgtc

SEQ ID NO: 2179 - DNA, 345 bp, Cyanidium caldarium
  Clone ID: LIB190-044-Q1-E1-A7
acccacgcgtccgggaagagaaggaataaacaagaaggaataataaccaaaaagtgggtaatccaaaaggaaaaagcccaaaaaccaagattaaggatcaaagttaagaaagaaaggaaaagggaagaagacaaggtaagcttaaaaacaagaaaccagagaaggaaacgttaaagcatggaagaaaagaaattcgaaaaagaacagaaaaaggttagaaagaggaccgaatcaaggtaaaaggttaaggaccaagaagataagaaaaaatccggggtggtttatcaaaacaagaaaagggaatttaaaggttaaaaaggggaagggttttacaaaaaggggttt

SEQ ID NO: 2180 - DNA, 417 bp, Cyanidium caldarium
  Clone ID: LIB190-044-Q1-E1-A8
gatagaacaaaccctgtccaactatttctttgatgatctcgagtatattcggagaacagtagcagatgagaaaccacaaattgaagagaagcttcgacacctttgtgatgactgtcattgttgtgtggtgttcacgacaggaggaacaggccctgctccaagagatgtgactccagaagccactattgcagtgtgtgataagttgttacctggttatggagaagctatgagaagtgtttcgagggaaaggggagttgtaacagccatactttccaggcagcaagcaggaatccggaatagaagcatcatcatcaacttgcgaggttcaacgagagcagttgaggaatgtttacaagttgttttgccttccttggcgcattgtgtttcgttgttacaaggagaatctattttgcaccc

SEQ ID NO: 2181 - DNA, 402 bp, Cyanidium caldarium
  unsure at all n locations
  Clone ID: LIB190-044-Q1-E1-A9
aggactcncgtcttcaccgtcgtcagttgcttccaagttgctccgatagcttttcgtagaaactgttgtttcgttagaataatctgttacaacaatcgtcatcgttgttttggttgtggtattcgacccaatatattctcgtggaatttggaaagaagagggttaccaagaggaaaagtatcttttattcatagcagactcgtacatcttccatcagaagttagtgttactagtatgacgaccagagaagtgttggcaactcgagtaacggaagcactcaacaacttgtttccagatgaagaaagtccggatccacaactcactgcagcaacccgtccagaatttggagattatcagtccaacgcagctttgtccttggcaaaaaagaaaaagatgaatccc

SEQ ID NO: 2182 - DNA, 413 bp, Cyanidium caldarium
  Clone ID: LIB190-044-Q1-E1-B10
aacgaacgaaagtctatgggatattctagaatggatgaaagtttcaaggaaattaaggaaatacgacaacggcttttgagaatgcgggaagatcttgcagagccgtcagctaatgaaccaagtgttcctgtttccggaacgcaagatagtcagtcgacaaagttttcgagccccgtcgtttgacaagtgaaagagcagccgacgataccgccgatgtggaaggttattggaagctgttacctggagatatgttggacaatgatcggtatagtgttatgaatgttgttggaaacggagttttttccagtgtacttcgtgccttggcacatagcaaagatacgactagggaagttgctatcaaagttattcgtcacaacgatgtaatgccaaaagcaccacaaaaagaaatttct

SEQ ID NO: 2183 - DNA, 233 bp, Cyanidium caldarium
  Clone ID: LIB190-044-Q1-E1-B11
tcgacccgcgcgtccgacggacgcgagggggatagagcataacttctaaacttatttatttgaacgcaattgaagtaatataaaacagtttttgactaatgagggaagatcttgcagagccgtcagcggatgaaccaagtgggccggtctcagggacgcaagcgagtgagtcgagatggttaccgaggcgcgtcgcttgaccggtgacagagcagccggacgcaccgcccatg

SEQ ID NO: 2184 - DNA, 101 bp, Cyanidium caldarium
  Clone ID: LIB190-044-Q1-E1-B12
cgcgagggggaaagagcaaaacttctaaacttatttatttgacggcaattgaggtattataaaacattttttgacgaaagaaggcagatcttgcagaggcg

SEQ ID NO: 2185 - DNA, 425 bp, Cyanidium caldarium
  unsure at all n locations
  Clone ID: LIB190-044-Q1-E1-B2
aatttgccgactttgggggaaagtatggatccttggctaaaagcgttgcaacttcaccgccaacgaagaaagcgactggaagagaactcagttgatcaagaagcaactttgggggatagaaactacgaagacgaagataaaaagacttcaagtcaccgttacggcaccacaattgagcgaccttcgttgtatgatgaaacggaaccgtttgctttcgaaaaaaggagttatgtgaagaaaagaaggaaatacaaagatttttatgatcgtcaaacattcanatcacaanggaaacggctccacttccagggaanacggaaaaagcgttgtagaaagttcctacaagaatagtcccgagaatgcccaagaggcgtcttttaagaacgacaactatttggaaaatggctcttccacganaagagata

SEQ ID NO: 2186 - DNA, 409 bp, Cyanidium caldarium
  Clone ID: LIB190-044-Q1-E1-B3
cccacgcgtccgcccacgcgtccgcccacgcgtccgcccacgcgtccgaggatgacaagtttgccagacaagtacggcttttctttggaggactatgcatttctgtttcagagtcaaccaaaggaattgataaaggagttatcagctgatgatatagaaggaacacttcccaaagatatagttggttcttactttctgaatggtcctggcttgttgcagatagatggagattggtttcatccctttgacggacatggtttcattcgaagtcttacctttagaggtgatggttcttgtttgtatcgttccaaatatgtgaagacggaagcctacctggaggaaaccaaggctggacacggagtatatcgtggctttggaatgctctcaagcggttggtggcgcaattgga

SEQ ID NO: 2187 - DNA, 422 bp, Cyanidium caldarium
  unsure at all n locations
  Clone ID: LIB190-044-Q1-E1-B4
cccacgcgaccgcggacgcgtgggaaaagttttcattcagcatggctcctaaaggtgctaaaagtgtacccgttgcaggtaaaaagccggtggcaaaagttgaaaggaagaaatcaaagaagaagagatcggagacgtattccatttatatatacaaggttctgaagcaagttcatcctgacaccggaatatccgcaaaagctatgagcatcatgaattcctttgtgaatgatatttttgagagaattgcgtcagaagctagcaaactagctgcatattcgaaaagcaagacgcttacttcgagagaggtacaaactgccgttcgtcctttgttaccaggagaacttgcagaacacgctgtatcggaacgtacanaagcagtaacaaaatacacttcttcttaacggtacaacaagtgctca

SEQ ID NO: 2188 - DNA, 410 bp, Cyanidium caldarium
  unsure at all n locations
  Clone ID: LIB190-044-Q1-E1-B5
cctttgcgcagttggaagataagataagttctgcagtgtcagctgctattggaaaggagttcaaggctacagtgggtccttctgtcggtggaggatgtgtcagtgatacaagagttattctttgtaaagactccgacagtttgaagttttttgcaaagatcggcactcctgatgaagtaagcatgttggcagcagaatatcacggggtcttggaaatgtacaacacgaaaaccataagggtgccgaagcccatttgctatgacagtacagaccgctttagttttctgatccttgaaaacctaaatatgacaagtagagcaggaaggaaggaatatgggttgttgggaaaaaaccttgccaaaatgcatcgctgtactagtgacagaggctttggttggcacagangaaat

SEQ ID NO: 2189 - DNA, 410 bp, Cyanidium caldarium
  Clone ID: LIB190-044-Q1-E1-B7
agaagaagagatatgcggtggtggacaaggcaacttgttgtttctacaacaatcacaacaaaaagtgtttggagtagatacttttctcattgtcggtacaacaattctggactactagttgcttccaccaacaacaactattcagagttgggttggaggagatatggaagttggcctcaaagaatagccagtataaacgggatagatgaactggtgaaaaataaaaacctcgtacgggaatattaccaaggaacgagtcttaatgtctcgttgctattcgatgaacctctgaatggttcgtctctgagttgggaggacgatgatgatgattcttcttcttctggttcttctggttctgagagtgacgatagctttgattcgtcatcagatgaggatagctcggatgatga

SEQ ID NO: 2190 - DNA, 402 bp, Cyanidium caldarium
  Clone ID: LIB190-044-Q1-E1-B8
cccacgcgtccggaggcggcaagttgttggttgttgtccgaaaacttttcagctttggaatatgtcttgaaaagaatagaccatacttcattggaacagctattagaacaagttacccaagaggttcaacaaatattagcagacgtaatacaatatttgttagaaaacaggcaacaagtggaatatacagtgaaacaagtcaagcagtttcaacagagttggataaagatagagaaaaaagtggcgcaagtagagagtcaactaagcttattggaaaaggaagtagcaaaggacttggaaaatagcgccaaaaatttggaagaaaaaagaaaatataccaactggaaggtcgctttggaggcactgcaaagaaaaaataaaactttgagcagtgcttggcgt

SEQ ID NO: 2191 - DNA, 416 bp, Cyanidium caldarium
  Clone ID: LIB190-044-Q1-E1-C1
accacgcgtccgcccacgcgtccgcccacgcgtccgattttattgcttgtcgtagcagcttctggtacctatgcttctcctttattccatacttatcgttcctcctcgaacgatacgattgctgcagaattggagaagatgaaaaacttcacaactctgttgagtctagccaaaattgccaatctgactagtacttttgaaaacgcttctcttgcagttacgctctttgcaccaacagacagcggaatctcttcaacactcaaagcagtgaatatttcggcaagcgccatagagaaaaacagcactctggtaaagatgatactcgagtatcatgtcgtacctgagccattaaagacttccaaattctccgctttgaactcttacaaaactttggaagggttcaatatcaccgtgac

SEQ ID NO: 2192 - DNA, 268 bp, Cyanidium caldarium
  Clone ID: LIB190-044-Q1-E1-C10
accacgcgaccgcccacgcgtccgcccacgcgtccggtcactttgccatggaagctttggggactcgtttgacgatgctaacaactccaaaacccaaaagttgataacaaagtatttaccaaactattcaatctgtgttttcaaataatctaggagcaaaatgtataaaagtaagaagccgtagaaagagagacctggaaacgaattttcttcgttgtaaatatcttctttgtttgctctaagttaccactctagaagcacaacaaaa

SEQ ID NO: 2193 - DNA, 387 bp, Cyanidium caldarium
  Clone ID: LIB190-044-Q1-E1-C12
accacgcgaccgatgacagttggaattgtaacagtagtaattcattaacgaaagagaccaactcagcatgcttttggcgcaacgagtcgattttcaaaggatacagtacactttgttcaagatgaatctagtcgttactccaatggacctatcatggataaagatttagaagagtgggaagcagatattgacgcggaagtggaagctttccgtaagagactcgaggaacttagtgcgccattgaagaataagccataggtcggtgcctttccgcatcgttccaggacatgtgagcagtcactaaggaagctttgtaccacaagttttcagagtacaaatgagaattcgagtaaaacgagtagcgttggtatcttatgaagtgttcta

SEQ ID NO: 2194 - DNA, 140 bp, Cyanidium caldarium
  Clone ID: LIB190-044-Q1-E1-C3
aaaaaaaaaaaagatatacttgtgtctgtaaaaaaaaaaaaaaaatcgggatatgctcaccaagacacataaaaaaaccccatgcaaaaaactataaaaaaaaaaaaaaaaagggggggccccccaaaggatctaacctt

SEQ ID NO: 2195 - DNA, 366 bp, Cyanidium caldarium
  Clone ID: LIB190-044-Q1-E1-C4
attgagcattgttttggcactgttttttttggggtttcactcgtgtgttttgtcttgacaaaactcgaagaagactatttatttcttgttatgtttgagagttatttctagaccgtgtttttggggttgttgtactcctgtcttggtggttggtgaatggttctagtgacaaagaaggttgtcactttcccgccattctccacagcttcaactaccaacttgtatacgcccacaactgcacaactatattactacagagtcgtggtgtagagcgacaagttgaatggttgaaaaggcttggtgaaaagtggaagactagtgagagagagcacttgaaaacttgtaaaattggaccccctggaaact

SEQ ID NO: 2196 - DNA, 411 bp, Cyanidium caldarium
  Clone ID: LIB190-044-Q1-E1-C5
aaataaactatttctgcaccaaaagaatagttaaggatctaggccacaaattaacagggtaagggtatgtgcagaaccgttcaagtgcgaattagaggctttagggctatccttattttggatagagcttggttctcgctccacatcaaaattccaaacgatagtaaaaacaaatagtttggcatccgcttgaatctttcaatacccctatcttatcattgtaatgaaggattttgagttgttttactggggtggaagatcagaaggaagaatggtttctacgacagaagaatatcgcatggattaactacaagtgaagatgattgggaactcttttgaaacgctatgacagaggatatactcaaagccttgtgcctttaaccatagaaacggacaactactcgaggaatc

SEQ ID NO: 2197 - DNA, 223 bp, Cyanidium caldarium
  Clone ID: LIB190-044-Q1-E1-C7
caagggaatagatggctatctttggtacatcgtggcagccggaagctttgtgatatggtggtcattccttgccttgtttatattcaaaaacagatcgctattaaactatttgaacaatttgtacaagaagaagaggaaagatatcaactcaataaagtagtatggcacttgtatcattcctctaaaacataaaaacattcataaaccataacttaacactagg

SEQ ID NO: 2198 - DNA, 394 bp, Cyanidium caldarium
  unsure at all n locations
  Clone ID: LIB190-044-Q1-E1-D1
accacgcgtccgagaaggggagggaggaggatgcaaggttggaagaaaccagtcataaccgatgcttttggaaacagagtaacttatgtgttgaaaagatatttcaacgcacctactactggagaagagttgccacattcgttgggtggtcatgtgaccgatgcagatacgttgttacggcacaaagggctgggagaagaaacagcgtattttctgaaagaagacgctcgcaagtttgaaaagttggcaaaacagttgaaaagtgcgttgaattcagggaaactaatgacaaaagaacaactcaaagtggccatggaacagagaggaatacaagtatctgaagagggttanangacttgcttcgtctaaaagagcacattcgattctcggatgc

SEQ ID NO: 2199 - DNA, 409 bp, Cyanidium caldarium
  Clone ID: LIB190-044-Q1-E1-D11
acccaattaaagtagttgttttatatttcgctgatatgcctttgtttctcaaaacatattgaaagcttttgaatgtgttaaagagactgatttttctttatttttgttttcgtgctagaatttgtttatgtttcctgttcgtcgcctttcttctatttctaaaggacaagcctttgaacacgctgtgttgttgtatctttcctacttgggttttttcatacgtagtactggaggagttggtgacggcggtatcgactttcgtggaacttggaaacctaataaagcaatagagcctgtacctgtcgtcggtcagtgtaaagcattatcaggaaaggttggtgttcacgttatcagagagatggaaggaatcttgtgccgcgaagagcctggtaccttgggtgctataatg

SEQ ID NO: 2200 - DNA, 405 bp, Cyanidium caldarium
  Clone ID: LIB190-044-Q1-E1-D12
aaaacattacacttgtacaatgatgagacgcttcttggtcgtttctgtgttcttcatgctatatgtttcctaatatggtgctattcatgcagctcctttatccatgcatcatctacaagattcgtctttactatacaaatggcaacaatcagaatccttaccaacttacaagagacagactgtcaatgcaaccgccgctccaactcccacagtcagtgctggagaaacagatattcaaattggattcactgggtccgcagtaagaatggctcaaaagtttggaatgctgccatccaaagaacgaactgtaattacggttgcacaagatgacgctgcggatgcgctcatattggagaatgcctcgccttatcatgtcattcaagtggaatatgttggcagtccttc

SEQ ID NO: 2201 - DNA, 340 bp, Cyanidium caldarium
  unsure at all n locations
  Clone ID: LIB190-044-Q1-E1-D2
agcaggtccaataacggaagtgacaatgagagtgagcgtccttcgcgactttcgcgagaaaatagcaaaaagcgtcggttaattgtatttgttgctggtggtgtgacggcttctgaaatgcgtttggcttatgaactttccaagaactccaatcatgatgttattattggtggctctgtaatattgacaccgaagaagtttattgagaatctgaacaacgtagtgcaagattttggaaatggtaatcaactttctcccgctggttcgtcgtccgcattganatagtttcggatattcccaatctcatcgaataaagtgtacaacaacgtttgtgttgggc

SEQ ID NO: 2202 - DNA, 405 bp, Cyanidium caldarium
  Clone ID: LIB190-044-Q1-E1-D3
aggacgcgtgggcggacgcgtggggtcgtcccattgggattctcattgttgttgttattgaggaacacggaggacgacagtagcgatgggattgtttagtagactgtttgtgaaaccgagtcgtgtaccgcaaagagtcgtagagtttcaaaagcgcaaggcggaaggttacgttacatacaacgccgggaagtacgaccgatacatcaacacacctatttacctgtttgtgtccttcaccggtctttatgcccttactgacggttgtctttgggcggcaggaaagaacgaaagtcaatcgtgaatagcgttttttgtccctgtgggacagtcttatgaactagtgattcctttgttctgccagttttagtttcctgtaatgaaagtttccttttttttccttgc

SEQ ID NO: 2203 - DNA, 305 bp, Cyanidium caldarium
  Clone ID: LIB190-044-Q1-E1-D4
gtctccaagaacaagtgcagaaaatgagaaaaaggaagctatagctaacttagctgtcatgtttccaaacttgtcgcgcactgagttatcgaacgctttggaagctaatagctattcagttcaaagaacggttgactacatactctcggaaaagtcctcctcctcacccgccgcggcagcagaagatgcgtccgaagttgccgctcgcatcgctcaggtagaggaagacgaacgtttagctcgtgccttgcaaagcgcttatgaacgggaaaataatgttgaaagacagaccatgtctcgaacga

SEQ ID NO: 2204 - DNA, 406 bp, Cyanidium caldarium
  unsure at all n locations
  Clone ID: LIB190-044-Q1-E1-D5
accacgcgtccgcccacgcgtccgcccacgcgtccgcccacgcgtccgcccacgcgtccgcccacgcgtccggaaaatgctagattttcatcgaaagcatggcggaatgggcacaatcttagtcactcaggtggaagaaccaagcaaatatggtgtcgttctttttgacaagaccgggaagattgaacgttttgtagagaagcctccaaagtttgttgggaacagaataaatgctggagcatatttgtttagtcctagtattttgcagaagctggttttgagagcgaactctatccagaacgaagtttttcccggaactggctgccgaaaggactggtggtatgcagttcgaacttgattcgtattgggcggatattggacaaccaanagattacttgactggaat

SEQ ID NO: 2205 - DNA, 407 bp, Cyanidium caldarium
  Clone ID: LIB190-044-Q1-E1-D6
acggacgcgtgggagagattggaagagtcgtcctggtgaactatggcaaagaccgaggcaaactgggagtcattgtggatgtagtagatcataatagggcgttggtagatggtccactcacgggacttgcgagacaaaccatcaactggaagagcttaacgttgaccccgttcaaagtaaagattcaacactccagtcgtacaggagttgtgagaaaggcatgggaagaggcgaaaatcacggaacaatggcacaatacggcgtggtataagaaactttgtgcacgaagaaccatacaaaaacttggagactttgatagattcaaagtgatgattgccaagaagagaaagtcggctatgattcatagtcaatggaaaacgttgaaatcgcaacatcagtaaaacatt

SEQ ID NO: 2206 - DNA, 407 bp, Cyanidium caldarium
  Clone ID: LIB190-044-Q1-E1-D7
acatggttggatatagtgactctggaaaggatggtggcagattgactagtgcatgggaattgtacaaagctcaagaaagtgtcaccaaggttgcagagaaatatggaattactttgagattctttcacggtcgtggtggaacggttggtcgtggtggaggacctcagcatcttgccattctttcacaacctcctggtactatcaacaaatatttcagagttactattcaaggggaagttatacaacaagactttggtttgcctggtttggcagacaggacattggagtgttatttgacagctatcttgaaagccgaaatgatgccttattctcaagtgaaagctgagtggagagaactcatggactcgatgagccaaatatcttacaaaacatatcgcagtgttgtg

SEQ ID NO: 2207 - DNA, 397 bp, Cyanidium caldarium
  Clone ID: LIB190-044-Q1-E1-D8
ctttattatattaagtttatcctcctttgcatttttagacgccgttcctagtcgacctattctttttcctttggaagagagtcaatgagcactagttggattcttcgttgtataagaacttatcatcgactcttagtggacaagccagtgataaccaaatcagtaacttgtggtattctttcttttacaggagacataatggcacaaactatcgaacacaagtactcgatgaataacaacaacaacaataacagccaatcgaatacttggagaatattgtctcgtatcgacatgggacgtactttacgttttacttcctttgggtttcttatatttggtccaagtgctcattattggtatcgcttcttagataagttgtttcccaaagccactactc

SEQ ID NO: 2208 - DNA, 410 bp, Cyanidium caldarium
  Clone ID: LIB190-044-Q1-E1-D9
accacgcgaccgatttggcggaagtcgatggaaatcttaagacctgctgctggtgatcctgttgggacgcttagttttgtcattgcaactgtacaaaaatataaaaattactgtacttgtcgtgctgtatatggccagaatacctgtattggtggttatcgcaagtttcaagagtctttgggtggtcgcaagaatgacagaagacacagttggcagatgacaacacgcaaagaaagcaatagtttcttccagtttctgcaaaaagtagttaatccaccaaaagatgataccacattgcgtaaatatcatcaagtcgttcaacgtatcaaccaactggaaagcaacctaaaggctctctctgatgcagagctgaaagaaaaaactcgaatatttcaacaaagactataaaa

SEQ ID NO: 2209 - DNA, 229 bp, Cyanidium caldarium
  Clone ID: LIB190-044-Q1-E1-E1
agaaagaggcaaatacgggaaagcagtaaaagaagaaagagaaaggaaaaaactgagtatcaggaagaaaagagggagtagatgaggaaagaaagatcaaggaagtaagagtaagagaaggagtaatgtgaatgaaagcaggaaagtatttgaagaagagagtgtaaagcgcgtaccttttgcataatgtcccagcgagtgaaagaggaagcaaaaagaaagaaaaaga

SEQ ID NO: 2210 - DNA, 290 bp, Cyanidium caldarium
  Clone ID: LIB190-044-Q1-E1-E10
cggacgcgtgggacgaaacatcataggaatccgttggtgtcccctgacaagtatcactagtactggtataactaacgcctattgatataattgaacttcgagtaacgggtgttagaaatgtcccgctttccggtttgaaactcctcaaaatattttggctggtctttcccttgtcgtcaacgatatggttctcagaatgtctatcatgcaagggtacactagcttgagtaatagcaacgagagaaattatagcaaatagaaagagtaaacctttgaagactttcatcttc

SEQ ID NO: 2211 - DNA, 260 bp, Cyanidium caldarium
  unsure at all n locations
  Clone ID: LIB190-044-Q1-E1-E2
aggtgtatgatgcangcaaagaagtgacgcagtagatcagagagtaacacatgcaagaaggaagaagcagagaaggactatgagcgagaaggtggatagtcgagagggaaaaagcccagaagccaagataaggtatcaaagtaaagaaagaaggaaaaggagaagaagagagggtacgcttagaagcagcaaaccagagaggaaagcgttaaagcatgaaagaaaagaaatccgaaaaagaagagaaaaaggtaagaaag

SEQ ID NO: 2212 - DNA, 393 bp, Cyanidium caldarium
  unsure at all n locations
  Clone ID: LIB190-044-Q1-E1-E3
accacgcgaccgcaacgagacacttttaaggtttctgtgggttggactggcttgccttggaaagtaagcgttggtcctgaaaggaacgaattcctccccttgttgtccttgttttcaacctgggttttggaaagtaatacgatacagtccaacgctgaattggttggttcacaaggagtgtctaagaaacgacagttttcttgtcatcagtggattgtanggaatacgagaaatacggaagatggaatagaattgtatccatcgtcgtagatagataacgaggacatatattccaagaatattggaagaaacacacatcaatatgtcgtccaaatcctggtccaagtagtgcgaagacgacctgtatatccacagctagtccaacaagtgatg

SEQ ID NO: 2213 - DNA, 395 bp, Cyanidium caldarium
  Clone ID: LIB190-044-Q1-E1-E4
gcaaagactgctctgagttgcctctttctctctttccttatcgctgccgcagttgcagccgacgtagtttcagaggagagatggggatatgctcagcaaacccaacaacagcaacagtgccaacaagtatgtaaacagtatgcatactatcagagtccagtctgcacttccgtaaccacacagagcccatactggacccaatgctcgaagactgtgcaaacctttgtcccaagccagtgcagtacttatacccaaatcccccaaaatggaccaatggcacacctacaacaacactagcgttacaacccaatgcaacaaggccgtgactacctatactcaaacctgctgtgcttatgcccaacaaacttcctatgcagtcagtaccgagcaatatg

SEQ ID NO: 2214 - DNA, 414 bp, Cyanidium caldarium
  Clone ID: LIB190-044-Q1-E1-E5
aggcaacttcaaggtaaggcttgagctccagttgcatctttgtcgcaaaccaacttatcctgttggcaagatgttggcttatcgtcgcgaaaaaacattatttgtttcctcgtttacaccttgttctcacgccaaatttctgtcaagtataagaagaacgaacctttcaatttgtaggaaaacaaccagcaaggagtgtggttacgtgttacgcatgggcgcagataacttgagtaggttgtctctctgcacttttctatttattacttaaaaagtaaagagttttggaaagatttttgggctggtggctttcctggaggagaagcttatttgaaggaggtgatagagagtaactttcaaaagccagttccaggactcgatactagtggagtaacgggacaaggggaagaaaag

SEQ ID NO: 2215 - DNA, 388 bp, Cyanidium caldarium
  Clone ID: LIB190-044-Q1-E1-E6
acccacgcgtccgcccacgcgtccgagacgtttgaaaggcgtccagtatgaaaggagacacaattgtaccacggtcaattcttcaaactcgccgaaccaccactaactgtgaaaatgcagtaaactaccattaggacggaaggaccccataattcttgacaaaataggttaaggaaggaaagagaaccatgaattacagaagttgggttaaaagatgaaggacaattgcatgaggatagggactctacgtgattacggaaaatacccttaacacattttggcggggaaattaacacctaacacagtgtattttacgcacgcaagggcatgagagatgtataataccagaaccattcttgaagaagcagactgatatttcacaggggga

SEQ ID NO: 2216 - DNA, 395 bp, Cyanidium caldarium
  Clone ID: LIB190-044-Q1-E1-E7
aagacatagtgaaaaccactcgcaagttgacacttcccgaaaagacagaacagaaaaaaggcacagaagtgaacactcgaggcatggcgttcgaaagaagacaagtcacagccatcgacgcgagcgaagacacgacactagtaacacaccaaaacatgataatagaaaccatagtgaggcggttgacaaagtagaagagatgagagcgacttattccaagcaaggatatggcttagtggttccaaaaggtgcaagctatcatggttggaaaccaaatgaagaaagctcggcgcctagtagtagtagtgacaagtccaagaacacaaaatcgagaatgaacacagaagctacaaactcggacgcagtgaaagctcatcgttcctcgactagtagag

SEQ ID NO: 2217 - DNA, 420 bp, Cyanidium caldarium
  Clone ID: LIB190-044-Q1-E1-E8
gaaaagagagagaagaaagaaaagaagagaaaagccgtactgaagaccgacacaggtactcgaggagaaaggagacccaaattaaggtgagagaatggacgataaggaactaggcaaaaggatatggtatctgcggtagaacatatgaaagaagcagcaccgactgtttagcaaaaacacagcactctgcagaaaagagaaaatgtaaagtatagagtgtgcggcctgccaaatagtagagaagaaatcgattaaaagtgaaagcgagtaaaagatgaggtatagagaatggcggtcctaacagtaaggatccaaaggtagcgaagtaaatagacgtttgaaaggcgtccagtatgaaaggagaaacgagtgtagcactgtctagtcgtccaactcagcgaaacagcaataactgtgaaa

SEQ ID NO: 2218 - DNA, 412 bp, Cyanidium caldarium
  Clone ID: LIB190-044-Q1-E1-F1
accacgcgaccgcttgtcggcagtgttgggtgagaatagtaaaacatgacgagatattccaaggaaccagataacccgacgaaaacttgcaaagctcgtgcttcggatattcgcgtgcattttaaaaacacgcgagagacgggacgtgctttgaaaggaatgagcttacagagagcaaaaacttatttgaaaaacgtgatagagaaaaaagagattgtaccttttgtacgctatcgttatggtgttggtagaaaagcacaagccaaacaacacggttttcccaacggaagatggccgaagaagagtgcgttggtatttttggacttgttgaagaacgcagagtcaaatgcggaagtgaaggggttgaatgtggactcgctttatatttcccatctacaagtgaatcaagcta

SEQ ID NO: 2219 - DNA, 400 bp, Cyanidium caldarium
  Clone ID: LIB190-044-Q1-E1-F10
acgcgatcggctggtcttgcgcattggagagtcttggcgccatgaatacagttactttgtatggagtttctttgccactaacagttgcttgctttttgtttcagtttattaccgatcataggacttgtggtttctttgcgttcatagactattatcagcttcttccagatcagatcctgcacaagtcagcccacattgcttatacccagttgctgcctcgagttgtgttcaatcagattgtcttttatctgcccagctttgttcttctgcagtatttgtgagttgcgtcctgttcctttgagcccaagagctctatatggctgtatgttgctgattatcgtttctactcgttccctcatgaaattatcgtttacagcggtcatccattcctgttacattc

SEQ ID NO: 2220 - DNA, 403 bp, Cyanidium caldarium
  unsure at all n locations
  Clone ID: LIB190-044-Q1-E1-F11
accacgcgatcgttttgcttcagccatctccgacgtagttctcatcaatttgtggtttcacgacgtgggaagaacagaatctgtcagttattccctattgcaggctatttttgtagaagctgcaaaggccgctgctgaaggtggtgcaattaaaacgctcatgtgctttgtagttcgagatacggatccttcttatacgacggaggaattgaagaacatattgttgcaaggggctanagatatttggaacactattccaaagtctggagaggcattcgacgccaagctggaagacttttttgactttgatttgtttgccttgccacatatgcactatgaaaaggagcaatttgaaagacagtgcaatgaattgagagatcgatttcttcaagagtccaatccc

SEQ ID NO: 2221 - DNA, 409 bp, Cyanidium caldarium
  Clone ID: LIB190-044-Q1-E1-F12
accacgcgaccggactacttcaagattccgaggggtacttctcatcaatttgtggtttcacgacgtgggaagaacagaatctgtcagttattccctattgcaggctatttttgtagaagctgcaaaggccgctgctgaaggtggtgcaattaaaacgctcatgtgctttgtaattcgagatacggatccttcttatacgacggaggaattgaagaacatattgttgcaaggggctagagatatttggaacactattccaaagtctggagaggcagtcgacgccaagctggaagacttttttgactttgatttgtttgccttgccacatatgcactatgaaaaggagcaatttgaaagacagtgcaatgaattgagagatcgatttcttcaagagtccaatccccaattt

SEQ ID NO: 2222 - DNA, 301 bp, Cyanidium caldarium
  Clone ID: LIB190-044-Q1-E1-F2
atgttgttggtctggttgctcaaggtgtgaaatggcagtagttgaagataacagagtctttgttggtggtcttccttggtcagttagtgaagaagaccttcgtgaaactttttccaaatatggagaagttgttgatgcaagggttgttgttgaacgtgaaactggtcgttcccgtggttttggtttcgtatcctatgcagaaggttcctccgtagacgaatgcattgccgcactggatggcaaggatatgcaaggacgcactattcgtgtgaacaaggcaatgtctcgtgaacaacgcgag

SEQ ID NO: 2223 - DNA, 420 bp, Cyanidium caldarium
  Clone ID: LIB190-044-Q1-E1-F3
agacattgacgtagtggtaaatgaataccgagagcaaaactgtcaaacttgtgagtactgaaaatgaagtttttgaagtagacacaagcattgtatccctttctgaaacaataaaaaacgtcttggaagataccgaagatacagagagcatacccttgcctaatgtacaaagacgaattcttgcaaaggttatcgaatattgtagatatcactcactcctaaaagaccattccgcagtctgaggaagatattgagcgctgggataaggaattcctaaatgtagatcaaccaaccctttttcatttgattctggctgcaaactatttggatatcaagagcttgttggatttaacttgtaaacgagtagcagatatgatcaaaggcaagaagccggaagaaatatgaaaagagtttaatatt

SEQ ID NO: 2224 - DNA, 228 bp, Cyanidium caldarium
  Clone ID: LIB190-044-Q1-E1-F4
ggaccagagagaggatgtgttgttccactatgttttactggtgtatacagatatcgttgtcacgagatcggatacccttcttaacgtgagagaatggacgataaggaactatgcaaaaggatatggtatctgcggtagaacatatgacagaagcagcaccgactgtttagcagaagcacagcactctgcagaaaaagagaagatggccagtatagagtgtgcagcctg

SEQ ID NO: 2225 - DNA, 408 bp, Cyanidium caldarium
  Clone ID: LIB190-044-Q1-E1-F5
cccacgcgtccgcccacgcgtccggaaaagagaagagagctagaaaggaggtaaaagaagagtaaaaggactagaagaggtacggaattcacgaggaaggagcgtgaaggaaggaggaatcccaagtaatcgaggaagaaaaagcttcggtgaaagcgtgaacggattttgtacacactgcccgtcaagttctggaagtgtgctaggagtggagtaaacagaaaaggaagtaaaaggagggaatgaagggaagttatggcaaaaacacgtgccagcagcagcggtaaaacgtgtgtagcaagcgtagagcagaagaactgggtgtaaaggtcgagtagtagagtaagtgtaaaagggaaaggaaaggagagaaagacgaaagggatgaaatgcagagatctctagaga

SEQ ID NO: 2226 - DNA, 187 bp, Cyanidium caldarium
  Clone ID: LIB190-044-Q1-E1-F6
gtccaaccacgcgtccgcccacgcgtccggaaaagagaagagagctagaaacgacgtaaaagaagagtaaaacgactagaagaggtaccggattcacgaggaacgagcgtgaacgaaggacgaatcccaagtaatccaggaagaaaaagcttccgtgaaaacctcaacggattttgtacagactgcc

SEQ ID NO: 2227 - DNA, 417 bp, Cyanidium caldarium
  Clone ID: LIB190-044-Q1-E1-F8
cgattgaatgtggtggaaagtcgacgtctgctttgccacctctttttggtgtctctcgtgtgttttgcctttcgaagctcaaagactatttacttcctgcatgttttagaggattctccagatattgtttgtactagtcttgttacatgcttcctggtgcgtgaatggctctattgacggcagggttgtcattttcttgccaatctccaccgcttcaactgccaaattgtgtgcgtgtatatacatatatttgtagattcgtggtgtaaaaagaagagtgcagcagttgaaaagtaagagcagattactaaggtacctgtagaggagcacttgagaagtggtcatgtccttttacatgtgtacttttaatagctgtttttgcttgtagagattgcaagtttagtttagttgaaaagg

SEQ ID NO: 2228 - DNA, 385 bp, Cyanidium caldarium
  Clone ID: LIB190-044-Q1-E1-F9
gtaacaagatcaaaactgtcaagcttgtgagtactgacaaagaagtttttgaagtagacacaagcattgtaaccctttctgaaacaataaaagaggtcctggaagatacggaggatacagagagcatacccttgcctaatgtagaaagacgaattcttgcaaaggttatcgaatattgtagagatcactcactcttaaagaccattccgcagtctgaggaggatattgagcgctgggatagggaattcctaaatgtagatcaaccaaccctttttcatttgattctggctgcaaactatttggatatcaagagcttgttgggtttaacttggtaacgagtatcagatatgattaaaggcaataagccggaaaaaataagaaaaga

SEQ ID NO: 2229 - DNA, 244 bp, Cyanidium caldarium
  Clone ID: LIB190-044-Q1-E1-G1
gtccgaccacgcatccgcccacgcgtccgcccacgcgtccgagcggaagatcttcctttcgagattgagaaaatgccagatatctacaccaagtttcgagaaagtgtggaagctggtggaaagatcagagaaccgttggaacttagtgaaggatttccacccagaccacgttgtgaacctgcgtgaaattccaacgcttaccgaccttggactagatgcatccccccgagcagtacctggtgag

SEQ ID NO: 2230 - DNA, 415 bp, Cyanidium caldarium
  unsure at all n locations
  Clone ID: LIB190-044-Q1-E1-G10
cccacgcgaccgcccacgcgtccgaatgccacgtatgatangagaatatgcggatggatatgacggatggaatanggtagcgagttatggatcgataataacggtgttatcgatgttatactggatgtggttggtagtgaagagttgggagaagggtaaggagagtgagttaaggtgggaaagaatgagtatagagtggggtatgagtatgataggttatcataactggaaggaggaggtgatgttagtgaaggggatggggtaaggccgagtacgatgaggtaatggaatttggatccgtgtggtggtggttcgagtccacctaccccagtgggggtaatggagaggagaagaaagaaggaagagaagcggatgttaaagggaagatgtactactagagtaagtgtaaaacgga

SEQ ID NO: 2231 - DNA, 384 bp, Cyanidium caldarium
  Clone ID: LIB190-044-Q1-E1-G11
aaatctcaaccacccatgcgcaatcatgttagcaatactagatgtcgtggtcaacgtggataaagtttaagaaaccgaagttataacgtcatcgcaaaatcttgcgagacaatatccaacgaataaccaaaccagctatccgtcgtttggcgagaataagtggagtgaaaagaatctcaagacttatctatgaagaaacacgaaatgtccttcatgttttcatggcaagtgttattcgtgatgcagttacttatacagagcatgctcgtcacaagacggtaactgctatggatgtcttatatgctctgaaacgtcaacgccgtaccctttacggatttggacgataaagcctgcttgaacaaagggtgtttctcaacacctttc

SEQ ID NO: 2232 - DNA, 406 bp, Cyanidium caldarium
  Clone ID: LIB190-044-Q1-E1-G12
agcaagcacatcccgatgtcgacacatgagaaattattcgacagcaaagaaaaaacaaagcagaaagctgatcatatactcgtcgtcatacctgtttggcagtccatttactattcttctctttggatgtgtaagtgtgccttcttatggttgcaactgttgagaaatgaacatctttctcatcagtaaccatcctcacatgacacaatcctgatatatagcacatgtttgtaactagaaactatgaaatgatccataatcaaaggaaggagataaaggattcatccctattctatgatctctattctttggagtcgaagaggaatcttttctagttgtgattctccattcgtcttctcgtggttgtaatgttggaaattgtaaatagagaggagaaacactgcta

SEQ ID NO: 2233 - DNA, 349 bp, Cyanidium caldarium
  Clone ID: LIB190-044-Q1-E1-G2
atcgttgctgctatttttgtgcatgtttcaggaaattggcgctatatgctcgggagtactttggtattttcatctatattactgatagccatgcttacattacccgaaacccctcgttggctgatgagaaaaggaagagaggggcagtcctataaagtatggagtattgtgcgaggatttgatactgaagaagaaagacaggagttttttgtgatgagaaagacggtggaacgggagttggaagagtctaaaaacagatatgtcattatggatctcgttcgggtacatcgctgtcgtcatgcaccaatatttggcactataatcgcaattcttggtcaattcccggaaa

SEQ ID NO: 2234 - DNA, 413 bp, Cyanidium caldarium
  unsure at all n locations
  Clone ID: LIB190-044-Q1-E1-G3
tcgaccacgcgtccgatcatgaaagctgccgttcttgcattccttgtcttagcactatgcgccgttgctattcaagcttctcctctagaagaaactttgggtgcctttatgccgggtggttatcaatcgcaaagccaagcaccaaaacctagctgttgcaagttgagctgtcaatatacccaaatttgtgaacaagttatccagactcagcaagttatccagactcagcaagttatccaaactcagcaggtcatccaaactcagcaagtttaccaaaacacaacaagtgcagcaaacacaacangtttcgtcagcatacggacgcaatgaggtatccacgaggggatatgcccaacagtctgtaaccccaagctcctgcaccttcctgtgtcactggttcagtcaagtgctgt

SEQ ID NO: 2235 - DNA, 247 bp, Cyanidium caldarium
  Clone ID: LIB190-044-Q1-E1-G4
caatcacaaattaaaaaaaaaaaaggggggcccttctaaagttttcaaccttacttacccttgaatgcaactttatacttcttcaaaattttcacctaatttcatttcactggccttctttttaaaacttcttaattggaaaaaccttgggtttacccaatttaatccctttgaagaaaatccccttttcccaatttggcttaataccaaaaaggcccgcaccttttgcctttccaaaaattttccc

SEQ ID NO: 2236 - DNA, 415 bp, Cyanidium caldarium
  Clone ID: LIB190-044-Q1-E1-G5
accacgcgtccgatggaagaatcgcaaaggcgtgtccaaggcattgtgaaagagtctgtgaaaacactttcgaagccttgggcaatatttattgaagagttgaatcgtagatggcaaaaatcttccaacagacttttgttagttcttggaatttggtttggggcctttgtccttttaacaacgttgtttacctgcattcttttgtacaaggatagcctcaagtcgccctcgagaaaggagaaatcaggaaataaggaaaacaaggagcaagtagttaaggagtcctcgaaaagcccagcgtcgtctctaaggcatcgagttcctaaaacttcttaaggggttttgcgaagaacgcttacacttttttccttatatagtccggatcttgcaacccgtttgacgtgcaaagtacttg

SEQ ID NO: 2237 - DNA, 414 bp, Cyanidium caldarium
  Clone ID: LIB190-044-Q1-E1-G6
atgatgtggaaatctttcacgtgctagtcttctggcatctacttatgtattctctattgtttctgtcttttccaacaacaacaaaagctaccaaacactgcaactattgttatcgacaagtaaaaaggagtctagaaaagagcaagttgctttcaaagaattgttccttgcttgttgttttcacaccatgttgttatttctatgacaacttgcggcactcgtctcgatatagaaagccgatgtggactatgtgtcagcaacaagaacaacaacaacaacaaatagaaatacttaggaccataaataccaacgggggatggatggtggatgttcaagtcaaccatcagcaacaactttctagacatacggtattactaagcaagggtttgtatgaagaacttgtatcgggtgacg

SEQ ID NO: 2238 - DNA, 395 bp, Cyanidium caldarium
  Clone ID: LIB190-044-Q1-E1-G7
ggcgtgttgcgaagcgttgtcgttatcgtctatggcggtatttgaaagtgatatagttggtcctgcaattcactttacgaaaaagtataattcaaggaggcgctacaaggagtgcatttcgtgctttagtgcttcgggtggtaaaccagggtggttcttttgacataagccgaaaattactcgcaacgggctatacgactgataagggtatgaagaccaataatggtgctgttcgagaaagtgacttttacgagagagtcttttcaagaatagcttcaaagcgctctgacttttggaaagaagtttctgtaaccttagtagtctctaccattgacaccgagtcggataaggttatttcagtgtggaacgcgtttgttaccaaagaccgtcagttg

SEQ ID NO: 2239 - DNA, 400 bp, Cyanidium caldarium
  Clone ID: LIB190-044-Q1-E1-G8
aggtgaatcgatcctgtgttcgtcgacttttgtgtgtctcttgaaatggcttccaatcttcaaacagacggcaccaacgttcccacttttaaaattatcttggtaagagacggtggagttggtaaaacaacttttgtgaagcgacatctttctggagaattcgaaaagaaatatattgccactgtaggtgtggaagtacaccctcttaaatttcataccaatcgaggccctatcgttttcaacgtgtgggacactgctggtcaagaaaagtttggaggtttgagggatggctactatattcaaggacagggtgctattattatgtttgatgtcacttctagaatcacttatgagaacgttgccaactggcatcgagacttggttcgagtatgtgaaaata

SEQ ID NO: 2240 - DNA, 230 bp, Cyanidium caldarium
  Clone ID: LIB190-044-Q1-E1-G9
agttacctattccttttgttttgcctcctttgattggcgaccgaacggaacctcacaaaccaacgggagcaagagcacttcgaggtaagactggacactctcctgattcctctctttacgactctgtgaaaaagaatatggatctgtctttgatagaacaaccaactggaaataactcacgactgtaacttttgcaaataaaatatatttggttgtggtttgggacactg

SEQ ID NO: 2241 - DNA, 110 bp, Cyanidium caldarium
  Clone ID: LIB190-044-Q1-E1-H1
aacgtgtggatgcaactcttcctaccatcaaatatatattagaaaaaggagcaaaaagcatcgtacttctttcccatttgggtcgaccagaaggaaaagtggacaaaaag

SEQ ID NO: 2242 - DNA, 394 bp, Cyanidium caldarium
  Clone ID: LIB190-044-Q1-E1-H11
aaaaaagacagaaaagctttcaggaggagtgaaacaagaatatttgtcgtttttggcgccttttgtgtatcaacgttttctcgtgtgtttgtttacttggaacgctctgttgattgaatgttttcattctaatttctttgtaatcgaaaccattcgagggtttgttacactgactgttggtgcccctgttttagctcttgccgctagtctttcgtttgcgcattattatcgacgcaaaagtatgccgatttttgcaaaggaagacacatttttcgagtgatggaacaaggtttgcgaaaataaagaatagttgtgttattcgttggaagctttaaaaagaataataaccaaaaagaccacaacgaatagccctttccaaaaaattgcacaacct

SEQ ID NO: 2243 - DNA, 351 bp, Cyanidium caldarium
  Clone ID: LIB190-044-Q1-E1-H2
attacataaaacttaccaatttggaacatccagaaccacttgctatacttggaaggtcttggcgagtaacggatattcttggaagaaagtgtcgactaaagcctcttcatatgtctagtcagaagaatccaatcatttccaaaggtcaaagcttggaatatgaaggccaagcagttattgactccaaaaagggaactttatatggaagttttgaagttatgaaaagccaaagtttatctttatttgtagcgaatatggctcctttaggacttcgaggaaaacatgtcgtttccaaagtatccattccataatatgtatttgtgtgtaaatactggaaacatttctcaaggt

SEQ ID NO: 2244 - DNA, 313 bp, Cyanidium caldarium
  Clone ID: LIB190-044-Q1-E1-H4
tgagcggatcttacacttcagtaagaagcgtcaatgaaaatgacgcagacgaactcttctcaaaggctgagaagaaagccaaaagtgctcaagcctctggaatacgtagtctacttggtttggggggtaacgcagccaagttggaagaagcagcagagctttttgtaaaggcaggaaacacgttcaaactagccaaagcttggcagaaagctggtgacgcttatatgcgagcagcagaaaattatgcacaacttccagatttaagtttccaaaccgcaaccaaatttgcctgagcccccccttggtttaaaaa

SEQ ID NO: 2245 - DNA, 340 bp, Cyanidium caldarium
  Clone ID: LIB190-044-Q1-E1-H6
acccacgcgtccggtggcaactccgctgtcttgaaagacataactgcaagtattgaaaagcctgacataaaatggataactaggacgaatctcagtacttgtctgaattctgcagaaggaaatgttacggttgacttgtcgcggcagtgtagcttgaaggatatattttcattgaagcttctcgacaataactttaagttggcgtgtttaaatgatgccttgtttttagttttacaaggcttatcctttgttattactggtaatcgtatattctgtagacgctcggacttgaatgaaacggaaccattggagtcctgcttttcgtttatgaagatatgcc

SEQ ID NO: 2246 - DNA, 316 bp, Cyanidium caldarium
  Clone ID: LIB190-044-Q1-E1-H7
atttcgcgtcagggcgtggcagaaatgagtggtagaaatggtagcaggaaataggcaggaaagagttgttgtagtggaatataatgaatcacttgaaattagcaaattgtcaaaggctgcttccaagagagcgtttagtgaggatatgtaccaggaatgtatccaaacgttggaacaagcaggttccagacctgatagtcgtggagtcgtgtttacaggtgaatgtgatttcatttgcaatggtgtagacgtgaatctactcaatgcaatgcatgtgtttcaggtgataagcaccgtagttgatcaattgatgaag

SEQ ID NO: 2247 - DNA, 410 bp, Cyanidium caldarium
  Clone ID: LIB190-044-Q1-E1-H8
gcgtccacaagtggatcattccacgttggtaaagatagacttgtctcaaggcagctttaaagtactccaagactgtgacaaagatttagaatgtgatcataataccaagtttcagttggaacttattcagtatggtctcttttcacctggtttttggacgagagaaaatgttctgctcttctatttggagctcgtgtcaggtgtattcataagggacactctctaccttttctacaacaaaggtgaagaacatttgtttgcgagtttaatgctgttgttggagacacaagtctcactgtatgcagacatacaaacaaactgggagaaacgacactttatcgttggcctcatcgtcaggtctttgtgtgaggaatatcaacgacagtattcagagctatgttcaccgaatg

SEQ ID NO: 2248 - DNA, 419 bp, Cyanidium caldarium
  Clone ID: LIB190-044-Q1-E1-H9
accacgcatccgcgaagatacaagacaaggaaggtattcccccagaccagcaacgtttgatttttgcaggtaaacagttggaagatggtcgtactctctcagactacaacattcaaaaggagtctactcttcacttggtcttacgtctgaggggtggaatgcagatattcgtaaagactcttactgggaagaccatcactcttgaagtggagccctcagatactattgaaaatgtcaagtcgaagatacaagacaaggaaggtattcccccagaccagcaacgtttgatttttgcaggtaaacagttggaagatggtcgcactctctcagactacaacattcaaaaggagtctactcttcacttggtgttgcgtttgagaggtggctgttagtgagtttatcctgaagttgtttttctg

SEQ ID NO: 2249 - DNA, 413 bp, Cyanidium caldarium
  Clone ID: LIB190-045-Q1-E1-A1
gacccacgagtcagcttgcggttcattgtcaccaaatgggttccttggtaatggcaaccgtgggccaactggaaggaaggatggaatccaattggtccccggaggtcgtcccaaaaacggcggaaaattccgtggcccggggtaccgttgaaaaagggtttggtgtaaagaatcccagttttatagggacaatcaccaacttcagttgccaaggggagaatttacacgacgggatgggaccggtggcaagagtattttacggaacaagtttgaggatgaaaacttcaacttggagcaatctgagccctttttattgtccaaagccaattcgggaccgaatgacaacggaaagtcagttttcattacagtagtgaagacaccttggctggatcggaagcatgtagtgtttggga

SEQ ID NO: 2250 - DNA, 320 bp, Cyanidium caldarium
  Clone ID: LIB190-045-Q1-E1-A10
gacccacgcgtcagcgaacgcgtgggcggacgcgtgggtggaaattcatcgtttgctagcagaagaccgtgcaattggtgatgtcagcagtgccaatggagcacttgaagcggaagataatgtgaacaatagtgtttatgatcttgcagctagtgggaagcggaaacgaaatgatctcgacaatggttctcagtttgcaccaaatgccaagaagcatcgaatagttattcccaaacgttacaaaactcatcagtggatgattgtttcaacttctgcgaaaactggcaatgcatctcctgctacacagtgctatacttcgg

SEQ ID NO: 2251 - DNA, 268 bp, Cyanidium caldarium
  Clone ID: LIB190-045-Q1-E1-A11
tgccaatctaacagtattcactcgttcctttgcagtgctacttcttcatcgagttccacaagcagcggtgatcagggaagcagtttaagttcgagtgttgctagtcgctatgcatatactttattatcccttgctcgaaaagaaggtattttggagaaagtcaccaacgatgtgaagcagtttcgcacttttgagtcggatcatccggatttcaagcgctttttacaagatcccacagttccaaaaggcgaaaagcaacaattattgc

SEQ ID NO: 2252 - DNA, 232 bp, Cyanidium caldarium
  Clone ID: LIB190-045-Q1-E1-A12
cgcgtcagggtgtatgatgcatgcaataacgtgacgcattcgatgagcgagtctcacatgcaactatgtaacgctaagcggtgactcatcatgagtgaaatactggaacaacagtgatcacagaagcatgttaggtatgggtatagtaaaacccattgcagaagtataagcaggaatctgcacaagagggaaggcacattggaactgataaaccgtccagtcaagcaaattc

SEQ ID NO: 2253 - DNA, 288 bp, Cyanidium caldarium
  Clone ID: LIB190-045-Q1-E1-A2
gagatatattggctcgatggttgctgacgtccatcgtactttgctctatggaggtatattctgttatccagcggataaaaagaatcccaatggcaaacttcgtctcttatatgaaggagctcccatggcgttcttaatggaacaagcgggaggaaaggcttcgacgggaacagaaaatattctggatattcagccgcactcgatacatcaaagaactccagtgtttatgggcagttatgaagatgtttgtgatttagagtcttttttcaagtctgcatctcaataaag

SEQ ID NO: 2254 - DNA, 395 bp, Cyanidium caldarium
  Clone ID: LIB190-045-Q1-E1-A3
gtagtttgtgtacgcggttgggagagctagatatatttcgtcagagtttcgtagaaaatattttgctagaggcggagagatgccgtgttgaggttgttccatcctttaatgtccttctgaacaggaaatttagtgctaatgaagagttgtattctccaagtgcttggaaagaattctatgacaaatatttgtcagaagatggaatatttttacccaacagaaataattctgctggacctgacattatcgttcgagtgtctgtgcctatagatgctagttcttccactcccaagaagagacagtcttctttgacccaagtatctatggatacaagttccaagaagagaagagtctatttgataggcatagcattgaaatgttatggaaagtctggt

SEQ ID NO: 2255 - DNA, 213 bp, Cyanidium caldarium
  Clone ID: LIB190-045-Q1-E1-A5
agcggacgcgtgggcaagcagtcatgttgggtttcctaccgactatatcaactagtttccccctaggacaaagtgaaagttggcactgttcccacgtatctaaatacagggttgggcagcgttttgtcgcacgcaactgtcgtcagcttcggcaaggaacaatcttgataatgtcaagcacaagctcttcggacaattggaaacagcagatac

SEQ ID NO: 2256 - DNA, 402 bp, Cyanidium caldarium
  Clone ID: LIB190-045-Q1-E1-A6
aggggtggcagtgaagcatgggatttgcagagttcgaacgctcttatgagaagtatacaggaggtgacccatcgagaatgaaagtgtccgtggagaaactagacgaagagcaggttccacttcatagaagagactattgtgcacatttgtatattcctttgcgccgttgtttgagagacaactattttttgccgtggtcttgtgaggaagagaaggaggcgtataaccggtgccaaagaaaagagagaagaagaagagaacgactctataagaaaatcaaggaagaggcctccaaagtatcggcgacggaagaacaagatgaataatatcgtgttggtgcgtcgtctttgtgttggaacaataataactcctcaaatagtaaacagcttgatttgattttca

SEQ ID NO: 2257 - DNA, 332 bp, Cyanidium caldarium
  Clone ID: LIB190-045-Q1-E1-A9
aggactacaaaggaattgccaatgcggattggaacataatttacgacaagttggaaaaaatcgccgctaaaggtgccaaagttgtacttagtaagttggccatcggagatttagctacgcagtattttgccgatcgagacatattttgtgctggtagagttccagaagaagacatgaaacgtgtcatgaaagccaccggtgcaagcatgcagtctacagtgaataagctaactgatgatgttctcggtacttgcgcattttgaagagaagcaagttggtaatgaacgttacaactttttcactggttgtccatatgctagaacagcgacatt

SEQ ID NO: 2258 - DNA, 284 bp, Cyanidium caldarium
  Clone ID: LIB190-045-Q1-E1-B11
tcatggcgcaatgtcttatgtcattcaagatgaagatggtcaaataaaggaagtccactcaatatctgcgggtttagactatccaggagtgggaccagagcacgcattcttgaaggatactggtcgcgctgaatatgttgcagttactgatgaagaagcaattcaaggatttaaactgctttctaggatggagggtattatcccggccctagaaacagcacacgctgtagcctacttggataaattatgtccaacgttatcaggaagccccaacatagtactgt

SEQ ID NO: 2259 - DNA, 181 bp, Cyanidium caldarium
  Clone ID: LIB190-045-Q1-E1-B12
ccggttagactctcagattcatacggtaatattgatatgttgtcaagtatgtattcatcatggagcaatgtcttacgtcattcatgaagcttattgtcaaataaaggatggccacgcaatatctgggggtttatactatccaagagttggaacagatcaagcattcttggtggatactggt

SEQ ID NO: 2260 - DNA, 388 bp, Cyanidium caldarium
  unsure at all n locations
  Clone ID: LIB190-045-Q1-E1-B2
agcccacgcgtccggatctccccagctaaacaataatggtggctttttgttgcaaggtctctgcataagaaaagactaagattagtttatacaaatgacagcaaactttgtatctttttgttcctgngtaaattttttatctcccagtgggttgtttgctgggaaaagggttgttttgcagatgtgaccttacttgagaaggaaccaaatatccactcctcgtactagtctgtttgttaagcggactggggagaaacttggtgaaacttttcacttgtatgttgtgcttggtcgcctcacagtcgaataggctctgaacctggtggagctattttgagcagagagccgatagtaaagagacagtcccgcgccctcatggagaaatgct

SEQ ID NO: 2261 - DNA, 392 bp, Cyanidium caldarium
  unsure at all n locations
  Clone ID: LIB190-045-Q1-E1-B3
agcccacgcgtccgattcatcgttgctcaatcttgttgcagatatgacaggtcgtggtaaaagtggtaaaggtttaagaaaaggaggtgcaaagcgtcatcgcaaagtcttgcgagacaatatccaaggaataaccaaaccagctatccgtcgtttggcgagaagaagtggaattaaaagaatctcacgacttaactatgaagaaacacgaaatgtccttcgtgttttcttggaaagtgttattcgtgatgcagttacttatacggagcatgctcgtcgcaagacggtaactgctatggatgtcgtatatgctctgaaacgtcaaagccgttacctttacngatttggaggataaagcctgcttgaacaaagggtgtttctcaacacctttc

SEQ ID NO: 2262 - DNA, 393 bp, Cyanidium caldarium
  unsure at all n locations
  Clone ID: LIB190-045-Q1-E1-B4
aggcatatggtacagcacagatggtgttggcgttgcttccaatggtgttttgagaccggaactagttatgcgatctataattcctgtagtaatggctggtgtgctaggtatctacggtctcatcgttgctgttattttggttggacaaagtatgcggtgtcttttgagtgaatagcactactttgactcttttgtagttgccgaaacgaactatccatattttcttggctttgcacaccttgcttctggactagcaaacggtctcagcggtctggcggctggaatttgtattggtatagttggcgacgcangcgtccgagctacagctcagcagccaaaactctttgttggaatgattctcatccttatattcgccgaggctcttgccctgta

SEQ ID NO: 2263 - DNA, 375 bp, Cyanidium caldarium
  unsure at all n locations
  Clone ID: LIB190-045-Q1-E1-B5
caactagagtggaaaatcangggatttgctaaaccgggactttgggaacggtattttgggattggaaaactttgaatgattttcaaggcctggacccccaaaaccgcccaatgtcgcatcatagttggaatcctaaagtgactcaaggttctcataagaaaagcaaaaaacctatttctatacgtaattgcaagattcgtccaggtattttattatgggaagaagatgtttctcgtgtggttcacttggaacgattatccttctattcttctacaacgaagcgtcccatttctttggttcctgttacgagaaatagtcctcctaccgctattattggtggatttacgatgcaccgaggctattctgggaatcaag

SEQ ID NO: 2264 - DNA, 399 bp, Cyanidium caldarium
  Clone ID: LIB190-045-Q1-E1-B6
cgtttcgtcgtcgtcgatttttccttcgacttgggcgccaatcttcttcttcttcttagaatgaaattgaatatcgctaatcccgctactggttgtcagaagcaaatagaagtggacgacgaaagaaaacttcgtgctttttttgacaaaagactggcgcaagaggtcccaggagacgctctaggagacgaatttaagggatatattttcaagatcatgggtggacaagataaggaaggattcgctatgaaacaaggagtcttgaccactggtcgtgtaagactcttattaaagaaaggagactcgggttgccgatggtacggtatgagagacggtgaaagaagacgaaagagcgttcgcggttgcattgtatctccagatatagctgtgttgaacctc

SEQ ID NO: 2265 - DNA, 389 bp, Cyanidium caldarium
  Clone ID: LIB190-045-Q1-E1-B7
cccttccgggttggttggggcaaccttgccaacgccggaagaacatccaacgggaagccccaccttgatcaacaccaggacaaaattaaatccattgaaggctttgttgtggggaaaaatttgtcccctatttccttcaatataatcgtggggttcattatctaatgggttggtgaaactggtggttggattcctaccgttgcagactatcgcgtattgacttcattggaaaaagaccaactgggaaaggaagctcagttgcatcaggatagtgcctgagaagaagcaatgttggttggttgttgatgtgttggtggtggattgtgtatatatatagagagagtgtgtgtgagagaaaatgcttgctttgtgagtgaccactcctcaaa

SEQ ID NO: 2266 - DNA, 271 bp, Cyanidium caldarium
  unsure at all n locations
  Clone ID: LIB190-045-Q1-E1-B9
gaccacgccgtaagccaagccttccggttgtaatccaagccagggcaatatggaaacatccaaatctggttacaagaccagaagatttgagaatattctgtcagaggtgagtattggcaactagtgtttgggagtangcatagatgaatatgtctctcttttttgttaggtcaaagaattttatgaaattcaccgtcaactccattcctatccgggtggaattcatttggaaatgactggacagaatgtcactggtaagtaataacttgtg

SEQ ID NO: 2267 - DNA, 396 bp, Cyanidium caldarium
  Clone ID: LIB190-045-Q1-E1-C1
acgggaatttggtgttttcaatatctcgggaggtttcagggtagttattcaatcattgagttcctctatattcaacgtcaatacgtattgatcagaagggaagaagagcatgtactgatggtgttctaccacactggacgggggcattgatctcaaagaagggcaaccactcattagaatgctgcaaagttcctgccatagagcattgtttgatttcgaggtttcttggcatcatagtcataaaatttcgtcgaagtccatcgcacagtgcaaggttatccttaagtgtaatttaaggctatttttattgcgacacggtccaagaaatcatagtgagacctcccagagtaaaacggagttaaattatccaaggtacccgaattcgtaaaaagacaa

SEQ ID NO: 2268 - DNA, 327 bp, Cyanidium caldarium
  Clone ID: LIB190-045-Q1-E1-C10
gacccacgcgtcagcgaacgcgtgggcggacgcgtgggcggacgcgtgggatgtggcgaccttccaaatgttccaacgaagtttctcttggctttacctttttctttgccacttgcgcttcccaaacaagtccgtttctctgtaaaaagcagagtaaataggaaacatgtcgtttgtactgtcgaatctgttgggtccatctatcaagcttcggatgtacgtaattccaagacttcagaatggaaggctttagaacaacacgcaaagaacgttaactcaaagactcacttgagagatctaataactgacccacaaagattcgaaaag

SEQ ID NO: 2269 - DNA, 301 bp, Cyanidium caldarium
  Clone ID: LIB190-045-Q1-E1-C11
gaccacgcgtcagagtatgacgatgggtattgaaagttccaattcttcctcaatcgagattgactcggaagaactagaaggacattactgatatcgtctaatgcaattgctagagaacggtcctgggatgagagcaggactgagagtgtctgaagactttattattgctgtggatggcttgactgtcgaggaagacgaagataagatatctgagtatttaatgaagaaaacacgacaatatgtcaagctagtggtttggaactgtctggatgaagatgaaagagacgtttccttgttggtc

SEQ ID NO: 2270 - DNA, 405 bp, Cyanidium caldarium
  Clone ID: LIB190-045-Q1-E1-C3
cccggcctacggtgttagaatgttctagtgaacaactctccatcttacgacctggagcagttacagcagaagaaattgaagcagttattcatatgcctgtttccgtattttcgtcatcagccactaggaataggaacgatgtccaagtacctcgagcaccagggatgaagtatcgacattatgcaccaaaagcaccgcttgacttggtgaaaggagatgtggaacaattaagtaaaaaagtatgcgaatggaagcaacaaggaaagaaggttggtttgttggcagtaagagaatttggtgcacagataacatctgcagatgtgttcagagcatgtggtgaaaataactgtttgtcaagttatgcccgagaactgtataaagctttgagagcattcgatgacagtc

SEQ ID NO: 2271 - DNA, 376 bp, Cyanidium caldarium
  Clone ID: LIB190-045-Q1-E1-C9
gacccacgcgtcagcccacgcgtccggttgcaaacgacgcatggaggacgatcatcgaatatgaaagcactacaacaacttgttgcgtttcaacacgatagctttttatctcatcacaaaatgaatatattttatatgccctcttcttctcattggaaaaagtcctcactcaagtggtcttttcctagaatggcggcatctcgtcctttatcttgtcatcaagtatttgaaataacccccgacaaacctgcagttgttgtcgaccaactttgtgaatcattcaaaatagaaaagagtcgtgatagtaagcaaccttcccgtgtggaatccgtgaaacaagtttccattgttgccaaacaacgcgaagtttttgggt

SEQ ID NO: 2272 - DNA, 76 bp, Cyanidium caldarium
  Clone ID: LIB190-045-Q1-E1-D10
cccacgcgtcagcccacgcgtccgcccacgcgtccgcccacacgtcagctgattcgttggcagatgcgtgatgttg

SEQ ID NO: 2273 - DNA, 186 bp, Cyanidium caldarium
  Clone ID: LIB190-045-Q1-E1-D12
ccggccgaccaagccgtcagctacggacaaaaaaatgggccttagtccccccggccctgttggttcaacgggccctttttgggaatcaaaggcctggggaccttttgccactgaccccggaaattgaaagaatgccacccatgccaaacaatccgggaatggacaaagtccaaggatttccggaac

SEQ ID NO: 2274 - DNA, 360 bp, Cyanidium caldarium
  unsure at all n locations
  Clone ID: LIB190-045-Q1-E1-D3
agcccatatcaacgagttttcttgaggaagtagtggttcctccggagtcatcagaagctttctcacgtttgcagagagatttagctatggaacgaagagagagtttgcgacgtttggaagatcagaagaagacgcccaaacaaggacgtcctacttgcggacctgatgaaggtgtcggagtcttctccaacgcttcggactttggtacgagcaaaataaagtgtgtggaatattggggtcgtcaaagtcgcatgttccaagagtagaacgtgcgtnttgtgtctgttttgtgggtgaacaacatttgttcttgtctgaaatagaataacagctatgctacaactaaganaactggtanac

SEQ ID NO: 2275 - DNA, 396 bp, Cyanidium caldarium
  Clone ID: LIB190-045-Q1-E1-E1
agcccacgcgtccgctttgtgctgcatagtgaaccctgttattggtgaaatttacaagttgattatagaggcaatagaaaagtatactcaactacctccacgtgcttatttcttcgtccgatatagtattgaagttgaatctgttcttttgggtgttttggaaagacttgcagaagagtatttggtatcacctcaagcgagaatagacgcagcaaagggttattgggcatcgttgaatgttgtttatagatattttgccgagttgtatgaacgttccatacactttcctcccatgagaaagccttcttctatgcaatatttgaacactcgagtgtataggccactttcacacgagattgtatacgaagctgatgagttgacggatcattctatctc

SEQ ID NO: 2276 - DNA, 227 bp, Cyanidium caldarium
  Clone ID: LIB190-045-Q1-E1-E11
catggactcgagtacattcctccaagacaacaaagacaagcatctattcactcttccgacaatgaatggaagacacctaagtggcagcggtggcgccaaagtacttgtcgtctcatggcacttggtaagcggcacgttgcagatgttttccatcgtcatgaatggaagccgctgtgttggggaatcttacctattttgtggtagctcattatttatgaaatctccgc

SEQ ID NO: 2277 - DNA, 228 bp, Cyanidium caldarium
  Clone ID: LIB190-045-Q1-E1-E12
cacgccgtcagggaaaatacgggaaacaataaaaaaaaaagaaaaaaggaaaaacttaattacaaggaaaaaacaaggaataaaataagaaaaaaagattaaaggaattagaattagaaaaagaataaagttaattaaaacaaggaaattattgaaaaaaaaaattttaaaccccttaccttttgcaaaagttccaaccaattgaaaaaggaagcaaaatgaaagaaa

SEQ ID NO: 2278 - DNA, 399 bp, Cyanidium caldarium
  unsure at all n locations
  Clone ID: LIB190-045-Q1-E1-E3
agccaaaggactggttggataaggaatatttagaacagctacagagttggatgaagaacggaagtactgtcgtggtagctgccatagacgatactccttgcattgcatttcgcgtcgatgatgagttgagaccggaagccaaacaagttgtttcgttttttagagaaaagcacaaaatggagtgttggttagtaaccggtgataacgatagcactgcatttgcagtagccagagcagtagggattccgatggagaaggtggtttctcaagcgttgcctgnggataaagttaaagttgtagaaagtttattgcagaaatatcaaagtgcaacaggaaaggccaagtctcgagtcgtatttgttggagatggagtgaacgatggtcctgcattagctgcag

SEQ ID NO: 2279 - DNA, 404 bp, Cyanidium caldarium
  unsure at all n locations
  Clone ID: LIB190-045-Q1-E1-E5
agcccacgcgtccgtataaaacggccgatggaaggttaataacccgttccaaggaaaaaaggtgtttaaggttggggtttttggtatgccaatggggataatatgttgggaaaccgtggccaatgttggtgaaaattgcaccgccaaggttacccccgtgaagttgggacaaggacaagtggcaatgtccaatttctatttcgactttgggaagtaatgtaggagactcaatagttcatttcgtgttgcataatatcaccagtgttggttcatcttccagtgcactgagaaggtttgccaaccatttangagtagtatccaccgaatattgtgtttatgggtttgaaggaaatccagtgttcaacgatggactgaaaaagttggaacagttattgcaaggatat

SEQ ID NO: 2280 - DNA, 294 bp, Cyanidium caldarium
  Clone ID: LIB190-045-Q1-E1-E7
agcccacgcgtccggaatgaagcatgcatcatactgccccaatacattatagagtaagacatgcaaatcatgatatttcatcggatatctaatcaggtctacaaaagtggcaatatctatgggcatagaaaaatgtacgatagtggtacagtaaaagttataccggaagtaaaaacctgaatctgataagacgaaaactacattgggactgataaaaggtccagacttgagaagtcaacaatgtggacaatttggcaatgtatagggaaatatcacccaataatgaagactaga

SEQ ID NO: 2281 - DNA, 413 bp, Cyanidium caldarium
  Clone ID: LIB190-045-Q1-E1-E9
accacgcgtcagggatcgttttgtacttgaaaacagagacactgtcagtgcgttgaagccgataaaggtgtaagtcaaagtcaacagttgcacttgcagagacactttcattgtgttgctctcatggaataactttgacgaaagagaagaccgattattctcattcgttgaggattttggttgtacagcttccttacagcgaacttgagttttcaggttcttctcttgaagtgcctgattcacaagacgatgtagcttatctgtttcctcttgtaatctatggaatctcttttttgtctgtaagaactcatcagcaacaaaaccgtacatttctgcagtagttgggttctctagaatctgcgttgtaattagcgcttgaagtccagataaaaaactctaaatgcctacgtttc

SEQ ID NO: 2282 - DNA, 272 bp, Cyanidium caldarium
  Clone ID: LIB190-045-Q1-E1-F1
agaaaagaactaagattcatgtaagggaaacaagaaggaacaacttgcgtttaatccccatgggaaggacctccaacttagaactacccttgggaagtttggcaccagatttttgtttactggaacccaagacaaactcgtatgtgtctttgctggagttaatattcaacatggcaaaaggcttcttgtagatttcatgtgcaaccattgcccttttgtaaacatgtgtctcaaaatatgggccaaatgggtatagatcttaaaagtataaa

SEQ ID NO: 2283 - DNA, 315 bp, Cyanidium caldarium
  Clone ID: LIB190-045-Q1-E1-F11
accacgcgtcagctagaacatcaggttgaaatgcctgaagaacgttccaagagaaacaatggttggacacaaaaaggacagcgtcaacaacaacagcacgatatttgaactaacctttttattgagtggaaccacaaagaaccatcgcaactaaatgactgttgcaatatgtaacgaataaccgatgcagtattcacggaattgcaaattaagaagcaaatagaatgacatagaaataaccaagtaagacccgaagctagctgatcataagctgtcccagcgaagtaaggctgaaccaataactgttgaaaaaga

SEQ ID NO: 2284 - DNA, 154 bp, Cyanidium caldarium
  Clone ID: LIB190-045-Q1-E1-F12
tttggttgctaacttgttgggtccaaccatgaatatggcaacaattcaacaatccaacaatcatattaaggggtcaaggtttaactaaaaagtataataaatataacaaattaagggttaataaaacaactcgaaaaaaataatttttgtggtg

SEQ ID NO: 2285 - DNA, 385 bp, Cyanidium caldarium
  Clone ID: LIB190-045-Q1-E1-F3
agcggacgcgtgggctttttcggcgatttccgctgtacatgatgtcataatgttaggctataaaatgattgtagcgaggggtttatttgcagcttgtttgttgggactaacttggttatatagaaccacgtgttgtagactttgacaagatccactctaatagttttctgttcctgtaagtgttctaaaaattatggatttcttcgctgtcatgcgttccagaaaggttttctgtcacctccatttgtagtgtatacatgcgacattgcttgttccacctggttttttgacactataaagcaattaaaaatgttccactccaaaaaaaaaggcttgaagttgattttgaataaaaagcgttttaaactttgtgtcaatagacaaa

SEQ ID NO: 2286 - DNA, 108 bp, Cyanidium caldarium
  Clone ID: LIB190-045-Q1-E1-F7
ccagaatatgatgtcataatgttacgctataaagagaatgtaaccaagggtttatttgcaacttgtttgttgggactaacttggttatatagaaccacgtgttgtaga

SEQ ID NO: 2287 - DNA, 311 bp, Cyanidium caldarium
  Clone ID: LIB190-045-Q1-E1-F9
gacccacgcgtcagaggatctgaatatttgtattttggtttgcaactccaacgtcacacatcaactgagtggctcggaatatcctttaagaaagcaacaatgcaaggacgctgtaaccgttttgcaatccatcgacccaaagataacgaacttaagagatgcgactatggaacagttaaatcaagtgaaatacaaaatgagcgaccttgcttatcgacgtgcacgtcatgtgatttcagaaaatgactgcacttgtcaatcaaccaaatgcctaccaaagaatcaataatacactggtagcaaactcaata

SEQ ID NO: 2288 - DNA, 309 bp, Cyanidium caldarium
  Clone ID: LIB190-045-Q1-E1-G10
gcgtcggttctgttaagttacggcaaaaggtggtgacacaaaagcaaacagtaaacagataacaagaatttttgcttgctcaaaagaaacaagcataaccatgcgtgggtggttggtacaagaacgcggttgagcttaaactgttaacccttgttcttctgactgtataaagagtcttattcttcgtagctcagtccaaagccgagttttcctgtcacctaaaaattagacattctcagctgtccttgtccttttttgaaagtgaatataagaatacaccgaggaacttttacacgccacaagaacgac

SEQ ID NO: 2289 - DNA, 247 bp, Cyanidium caldarium
  Clone ID: LIB190-045-Q1-E1-G12
gatattgatgatcaatggttaataaccagaataagaaatcctcccaacttggtgaaagggtttccaaccacaattaaaactccttggggtaaaatccaaccttggggaaggaaaaattcggcaactttggacggaaatccaacttaattcaaaacccctttcaagaatttggtgaacatttaacggcaaggttccaacccaaagctttccttcattggtaaactggagaaggaatggacaaaatgga

SEQ ID NO: 2290 - DNA, 399 bp, Cyanidium caldarium
  unsure at all n locations
  Clone ID: LIB190-045-Q1-E1-G3
aggttggagtatgagtgggaagataccaacggaggacgtaccagaccacccgtttcttangagaaatgtttactggacgccttggccacgcttggctaaactcattcctaacgaaagggttcgagttattggaggcgttctgactataatggcgttaagtggtgtgatattctacactgaactgcaattccggagacccgtgcgcaccctgactccggagtggattgaagcagagcgtcgcaaagagtttgcaaaggagcgagagtcgggcccgccagtggagcttgatcctatcttgcacaggcgtggctatcaccactagatagttcgattatttcagtgatttgttggcagaacagttgttgaggtttgtgtgataaaataaaatgcccaaagatg

SEQ ID NO: 2291 - DNA, 399 bp, Cyanidium caldarium
  Clone ID: LIB190-045-Q1-E1-G5
agcccacgcgtccggtccgacataacaacgtagttcccaacggtcactttcataaggactggcaaagaagagtgaaaacatggttcaatcaacccatgagaaagaagagaagaagattagctcgtcagaaaaaggcagcacgtttggctcctcgtcctgccaaaggtccattaagacctgttgttcactgtcctacagtgaaatataatacaagagtgagactgggaagaggttttactttggaagaattaaagcaagccaaaataaacccacgattcgcgcgaaccatcggtattagcgtggacccgagacgaaagaatcgttcggtagagtctttggagactaacgtacaacgattgaaggagtacatgtctcgacttgtgttgttcccaagaagac

SEQ ID NO: 2292 - DNA, 400 bp, Cyanidium caldarium
  Clone ID: LIB190-045-Q1-E1-G7
agaacagcaacaatgttgaataacttagtgtgagcgactcagctcatacaaagaatcgtaagttttgtagagagtataaactgttctttcttcgcgatattgtccaggcagtatgaacgattcccgcagattgcagagaaggtatactggtcttatgtcgacatctacacgtaaacttccctgtcctcaagggacgagcttttatgtgcgaagctaactcctgttcgtttggatctatgctaattgaaagagatcagaacacagtctgaatcgtggaactcgaacaggaccactcgctttgtacggaacacacggaaatagtttgtaaatatgcttagcactttgaagaaaacttctcagtggcagacgcagtattcaatgttcccgtgttagtgaattc

SEQ ID NO: 2293 - DNA, 405 bp, Cyanidium caldarium
  Clone ID: LIB190-045-Q1-E1-G9
accacgcgtcagcgagtcgatcactggttttggtgaagtgttcttcgtttcatgtgaaactttttgttatcaaattcatctaatcacctctttgggttgcaagtggatgtgttatcggtacttgtttgtttgagaagcataactggtttgtttcgtcatgacacaattttcgtgtgaaagctttcctttgtagatcctgctttacgatttttcacctgttcactttttggtattcagtatcctcatcaccagaatacatactaaagtttctggacgagtttaacatctctaacaattctccgtatcctaccgcaactcatgggaacaattgcagcatgtaaatgaagagttgtagactttaatcaatctccaagcaggaattggtagccccttaaagactgggcc

SEQ ID NO: 2294 - DNA, 397 bp, Cyanidium caldarium
  unsure at all n locations
  Clone ID: LIB190-045-Q1-E1-H1
aggaattccccaaaaggaaatggtccaattgaaaacccttttgaatgaaaccacaaattctcccttaattggccccaacggccaaggctttttgaagcctaatgagtgtaaaattggtattatgccgggttatattcattcaccgggttgtattggagttgtttcacgttcgggcacgcttacatatgaagctgtggatcagacgacgagacatcaacttggtcagagcattgttatcggaataagtggtgatccttttcatggaacatcctttatggactgttttgatatgtttttgaacgatccgcaaacgaagggcatcgttatgattggcgagatangtggtactgaagaggaagaaactgcggaactgctgaagaattcatccataaagaaa

SEQ ID NO: 2295 - DNA, 92 bp, Cyanidium caldarium
  unsure at all n locations
  Clone ID: LIB190-045-Q1-E1-H10
agaagattgcttcatcagatccgcggtggaggcacgaanacacaagttgagaaagcttgtaccgagtcccaaactcgtttttcatggacgtc

SEQ ID NO: 2296 - DNA, 137 bp, Cyanidium caldarium
  Clone ID: LIB190-045-Q1-E1-H12
gcccgggcccaacccacaaggcaaagtgggccaaggaaggggaaaaagaaggcagtaatcaaagacgggaaaagaaaaaggcaacggccgccttttcctaaaaaacaaagccaattttccaagtggcaaaattttgg

SEQ ID NO: 2297 - DNA, 366 bp, Cyanidium caldarium
  Clone ID: LIB190-045-Q1-E1-H3
agcccacgcgtccgggcatgttgcccctttggctccgggtaacccaattacagaaaccttttgaccaaccaaaaacggtccaatttgaaaaaatttatatatagtgtgatattttgaagacttgtaatctattggtgcgtttctttcgcaactagtgcaaaaggaagcaagcgctatctagtgtcggtcgtattcagttggtttataagcttttggtcttttcttccgttgcaaattgttgatactttttgatatgactagagataaagattgggaggttatgacaagtatcctggacaaagacgatctattcggtattctgacaagattagacttggttcaactcaagaaatctattgtcaaaca

SEQ ID NO: 2298 - DNA, 410 bp, Cyanidium caldarium
  Clone ID: LIB190-046-Q1-E1-A1
ttcccgggctcacccacccttcaagacaaggacccctcggaattcatataaataaactatttctgcacaaaaagaatagttaaggatctaggccacaaattaacagggtacgggtatgtgcataaccgttcaagtgcgaattcgaggctttagggctatccttattttggctatagcttggttctcgctccacatcaaaattccaaacgatagtaaaaacacatagtttggcatccgcttgaatctttcaatacccctatcatatcattgtaatgaacgattttgagttgttttactggggtggaaaatcagaaggaacaatggtttctacgacagaagaatatcgcatggatcaactacaaatgaacatgattgggaactcttttgaaacgctatgacataggatatac

SEQ ID NO: 2299 - DNA, 426 bp, Cyanidium caldarium
  Clone ID: LIB190-046-Q1-E1-A3
gacccacacgtcaacagtcaggacagtcgtccgcagtgaacgacttgaaaagagcagttacgaaagctagtttggatagtgaaacaagacgacgaatgaaggatttaaagaaaataatagacgcaacgtatttacaaccgtcacctcgcaactccaagtgtgggcctcacaaagttctaaagtatattcagcagcgtctccgtgcgaaagagtggccggttgtcctgaaagctttgctgttatgtcatatcttactggacgaacgcagtacaggaatggtggatcttttgcatcacacgccttttatcattaacctgcaagagtttcgtgatgcttccaaccccagtgcttttgattattcctcatatacaaggctgtttgctcgctatctccaagaacgaattgttactatacgaactttgggtg

SEQ ID NO: 2300 - DNA, 430 bp, Cyanidium caldarium
  Clone ID: LIB190-046-Q1-E1-A4
aacgaaaagcaactcctttccaaccccttgaaaagaaagaaataccaaggtttttggtatatattgcttttgttgacgttattattatacgcaacttgttttgtagcttgttcctgtttcaatgccttctttcggtagatggttatggttttcgagaggaatagacttttccttcatggttgtaggagactggggaagagaatgacatcatcatcagaagaaagtagccaacgctatggctgtagtcgctcgacagaccaatcctcgctttattatcagtacaggggataacttttatgactatggagtgtcttcagcaagagacaagcagtggaatagttctttcgaaagcatatatgatagttggttgaagaatattccttggtacgctgtcttaggaaatcatgaccatttggtttgactgcacaag

SEQ ID NO: 2301 - DNA, 410 bp, Cyanidium caldarium
  Clone ID: LIB190-046-Q1-E1-A5
cacacgtcagcaatgaggagggtggtgtggttgcgggagtgtggtctttttgtaagaataaagtcatcgtaaagttgcgctaagaatactgataaatgtcacgcaaccaacaagttgttgggtatgggagcacggataaaacaagcccgcaagtgatgtgtactgaaaacagtggcgctgttgctggctccttgcgtggcgccaaccacgaagacgaagctttggtggaagcctggattcgaaaagctttttctttgttcgaccaagacggaaaaagttatgtggatagtgtaaactttgcagacgatatccagcacttgtttcccaactgttaggaagaagaagtcgaagagttgctggaagacacggaccccaacggtgttggagttgtcacttttgacaacttttgt

SEQ ID NO: 2302 - DNA, 401 bp, Cyanidium caldarium
  Clone ID: LIB190-046-Q1-E1-A8
gcttctgttatggaacttgtggaagacgagtatgttgcaatcgcgttattgctactttttgagcataacaaaggagactcatctttctttaaaccatatttggacatattaccctctctcgacgaaatcaaccccttgttttggtggtcagatgaagatttactgctgttacaaggcagtccaactttatctgcttgtcagcaactgagagaaaaacttgtgagagagtatacatatctagagaaccatattattccacaaatcccgaacctggcccgtatagactttagacaatttcagtgggcatttggtattcttttttctagagctatttgttttcctagtacgaagagaattgcattggtaccttatgcagatctgctcaatcatagtcctttttg

SEQ ID NO: 2303 - DNA, 246 bp, Cyanidium caldarium
  Clone ID: LIB190-046-Q1-E1-A9
cccacacgtcacgcccacgcgtccgcgggacgcatggagggtcgcaaggatgccactggacctgagacttgtccgatgatggaagacgtcatgctgccgaacaccatatgccgcagttgaagaatacagtttatcgtatgggagtgaccgatgatgagattactgtattgagtggtgcacatactttggggcaatgtcacagtgaccgttcacgttatgaaggtccatggacacatcaacctttgc

SEQ ID NO: 2304 - DNA, 222 bp, Cyanidium caldarium
  Clone ID: LIB190-046-Q1-E1-B12
tcgacccacgagtcagctctagactctgaaattcgcatttttccaagtaaagccctgtccatgacaaaaaaaaaaaaaaaaaaaaaaaaagagaaaaacaaaaaagatcataaataaaaaaaagggtggatgcacaatggggtgcaagtcttatttccgcgtgcatgagagctcattactcttcaattttgtcacctagtttcagttcgtcaggcagtcgtt

SEQ ID NO: 2305 - DNA, 170 bp, Cyanidium caldarium
  Clone ID: LIB190-046-Q1-E1-B2
aattttttttcctttggcgatggggtcctcctccttaaaaccttttccaaaagttataagttaccccaaaatttggaatttgggctttggttggccttggaaactttgattaaaaacaagatattgtccagttcctgcactgaataaacagtgtgtggagaacaaccttg

SEQ ID NO: 2306 - DNA, 429 bp, Cyanidium caldarium
  Clone ID: LIB190-046-Q1-E1-B3
cgtcaagacaaaatacattctcgtgctcgtggccctgttcaaatactcacaagacagccggtagaaggaagagctagagaaggtggattgcgctttggagaaatggaaagagattgtatgatttcacatggagcggcattcttcttgaaagaacgactgatggatgaatccgatgcttatcgtattcatgtgtgtaatatgtgtggattgattgcgatagctgatttaaaaaggaatactttcgaatgtcgtagctgtcgtaacaaaacagaaatatctcaagtattcattccttatgcgtgcaagttgttgtttcaggaactcatggcaatgggtattgcaccgagaattgtaactgctgatgaataagtcttcttctcattccaactcatcccaccattcactatcttcttcgggatattaccaacg

SEQ ID NO: 2307 - DNA, 406 bp, Cyanidium caldarium
  Clone ID: LIB190-046-Q1-E1-B4
aagagcaatcgcctcttcgtcgtgagttttatgtaaatactcgactcatcgtctatagttttgtgtggaatatatttttgtgtgccgtattgattggctctacgtctgccaatagttttggtaccaacttgaatattccattgtatcaagatagtgcacatggacccatagctgcgttgtggtatattgtctcgggatttgcgatatgttggtctatcgtcgtcatgttttggtttttcagacgcaacaatgccgtgggaatatattgtcgtacggacaacgatgatgcatcctactagcagtgatagtaatagtaatagtagccagggaaatacagagagagaaagatgggcaagcaacgacaatcacaatttatacacataaaccaagatgtttagcgattgac

SEQ ID NO: 2308 - DNA, 355 bp, Cyanidium caldarium
  Clone ID: LIB190-046-Q1-E1-B5
ccgggccgacccacacgtcagatttatatttactacttggtgtggacactgtctagactatattcctgaatatatgcaacttgcagagaaactagcgcatgtacaagacttgacttttgcagcaatacaaccacgtgatatgccacctatagctagaagtttagatgttcgttcttttccagtattttatttgtttttacgcggacaaaaagacaagcctattcgatggttggcggaagatcgaaagcatcttgaagcgtggatcgcacaatatcgagagaagaatgcacaaggcatcgattcctcgtattcaaaatagtcaagtttatgtatatcagaataaacaaccttatgg

SEQ ID NO: 2309 - DNA, 401 bp, Cyanidium caldarium
  Clone ID: LIB190-046-Q1-E1-B9
gacccacacgtccgcccacgcgtccgcccacgcgtccgcccacgcgtccgcccacgcgtccggatctaaggaagttagcaaccaacttgattccatttccacgtctacacttcttcatgattggattcgcacctttgagttcaccaggctctcaacaataccgttctgctagtgtttctgagctgactcaacaaatgtttgatgcgaagaacatgatggcagcatgtgaccctcgtcatggtcgttatttaacagctgctgcgtatttccgtggaaatatgtccacgcaagatattgatgatcaaatgtttaatatccagaacaagaattcttcctactttgtagaatggattccaaacaacattaagagctctttgggtgagattccacctttgggtatg

SEQ ID NO: 2310 - DNA, 422 bp, Cyanidium caldarium
  unsure at all n locations
  Clone ID: LIB190-046-Q1-E1-C1
acgaaatgaatttattaccgcacaagagttggaatatttggagtaccaagaatatagctcgaattgaaagggatgaacaagcttttgaaaaagagcaaagagaagcgcaaaggcaagaaattcaacgacaaagggatgagaggttggaaaagttgcgcaataaagtacacgcaagacaagaagaaagaaagcaaggagatgagcaacggtgtttgtcaggggaaaagaacgaggaaccagctcggagtgtgaatacaacgataaagacgactttgaaagaaagtttaaaggttccttggtattcggtactcgataaagtggaaaacaaaacctcaaccatcggagacaagagaggaagacccgattgtcaaaatacgagagtgggagaaacaacanaacgttatacacaaggaaagaaagcc

SEQ ID NO: 2311 - DNA, 351 bp, Cyanidium caldarium
  Clone ID: LIB190-046-Q1-E1-C10
gacccacacgtcagcggacgcgtgggttttttttgaacacctataccaacctactattactattattacgcaagaaatgcataacaggaaaatgtcgagagaagcgtataaaagagtagctcttccgcagaaaaatctgatgcggttcgagggtatttccgcacgtactactattatgagactcctacatattattactattatgagactccgacataatattactattatgagactccatccgcaattccgaatataaatccttattgtacctatacccaaatgtgtcagagtatatgcacgacttgtccaactccatattaatagtcgtatgatggttaagatcatatg

SEQ ID NO: 2312 - DNA, 369 bp, Cyanidium caldarium
  Clone ID: LIB190-046-Q1-E1-C11
cggctcgacccacaacgtcaggtatcgccaaactatatggacgaactggaagaggtaatgttacaggggatttccatcagaagttggacatcaattccaacgatagcttcacggtccacatcgaaagtaatcaacacgttgctgtcatggtaaccgaagaagacgaatcaccaactatagtggtgtgacacaatagaagaagatatggcatcgcatttgattcacttgacaggtcaaccaatagcgactccaatgtcaccatcagaagtacttttggtaacttccgaatgccatacggtgacaacatacagactaccgatgaaccttgcagaccaaatatgcaacctgcaacaaatatggtagctgcac

SEQ ID NO: 2313 - DNA, 431 bp, Cyanidium caldarium
  Clone ID: LIB190-046-Q1-E1-C4
aaagaaaatggcaaatactcgtctcaacttttctgtcggaaacaactcgttactggagtttgccaagggtatttaaaatattcctcatcgagaactgcagaaactagattatataggacaacgactttctagtagtgttgctttacaattttggaagccaaagtgcgattcaaaccagttttgttctttaagctctctttggtcgaatgaacaagacatttctagtagaaacaccgacatgagagtatgtattgaaagaggatatttagtggagttgatgggtgagggattgtctgtttgtatgcgttggattatctcggaatatattcactacttggaggagactccacaatcctattcgtttcctcgtattatttatatcgatacttgtgcaagtctaagtattatgaaatggaacgactatttcaaac

SEQ ID NO: 2314 - DNA, 422 bp, Cyanidium caldarium
  Clone ID: LIB190-046-Q1-E1-C5
agcccacgcgtccgatgcgttggtcgtttctggttgctcgagtcgcccactggtttgccaatgaagttgtcgtgaagaaacttgcaaatagtgaagcctttcagaggtttgcagtacgctcgtctcagtctatagaacagttgatacgaaagggtgaacaaaggttggttcaaaccaggggtaaagaaggtttgacaggtttggtaagtacttggggggtttgaaaggtccgtagtttacatgcagcaatagagttcagagatagttattcaaagaatagcagaaaaattggcaaatttaaaaaaaagctaaagtcccagagcttttcggaggctttgaaagaagaaatgaagcgaactatgaagaaatagtaggaaggcttagaaatagtaggaaggataagaaatagtttgtataaaaag

SEQ ID NO: 2315 - DNA, 424 bp, Cyanidium caldarium
  Clone ID: LIB190-046-Q1-E1-C8
acccacgcgtccgcccacgcgtccgagccaaagtatccgataaaatacaactcatccagaatttattacaaaaagtggatgaaatggttatcggaagtggcatgtgttatacttttcttcgagtattatattccatgccgattggagactccatttatgatgagcctggatcacatttggtagaaaatattatgaaagaagccaaagaaagaaatgtaaagatacattttccagtagattttgtagtagccgatcgcatggctcccgatgcacatacagagatacgtaccagagaacaaggtattcctgagcatatgcaaggactggattgtggaccacaaagtattcaacaatttattcaagtagtgcaacattgtaatacaatagtgtggaatggacctttgggtgtgtttgacatggatat

SEQ ID NO: 2316 - DNA, 407 bp, Cyanidium caldarium
  Clone ID: LIB190-046-Q1-E1-D11
gacccacaagtcagcctattctggcatgcctgacatccaagggtttattttaagaggaagattggtaggattgggagaaacatggctagccaaatgccagtaaccacgatgataatcattggttggcatccgagagcaacaagacttttgttgcacgatatcagccacagtttggtaccgattagttgctcatcaattagtaggtccaatcaccatgagattgtctaatattggaggctcatgcctctgggcattttcaaggaatattatgatactgactatcaagaattcctaatggtcacgttgacacagctatcaatatcacatttgtagagttacgaactcaagattggcaatatatactggagaaagtagagttgaaaccaatcattcaacatcatggagtg

SEQ ID NO: 2317 - DNA, 426 bp, Cyanidium caldarium
  Clone ID: LIB190-046-Q1-E1-D2
aataaaattgccatagaatccctgaacgaaggtagaattggcatacgagctcatatgactggacttgcccaaggtgcaatggatattatatttccatatctacatgagacgaaacagtttggctcccgtatcggtgattttcaaggagtccagtttcagtatgcacaaactcgagttgaattacaagcagcgcgagcgcatgtttacaacgctgctcgtatgaatgatgcaagtatatctattcggaaggaagcagccttcgccaaatactacagtgcccaagttgccgaaagaattgcttccaaatgtattgacttggctggaggaatgggattcgtgaaggaatttggtttggaaaaatattacagagatgtgaaaatacgacacatttatgaaggcaccgataatatccagttgcaaacgata

SEQ ID NO: 2318 - DNA, 437 bp, Cyanidium caldarium
  Clone ID: LIB190-046-Q1-E1-D4
acgcgtccagtcaacgtcgaattttccttcgacttgggcgccaatcttcttcatcttcttagaatgaaattgaatatcgctaatcccgctactggttgtcagaagcatatagaagtggacgacgaaagaaaacttcatgctttttttgacaaaagactggtgcaagatgtcccaggagacgctctaagagacgaatttaacggatatattttcaagatcatgggtggacaagataaggaaggattcgctatgaaacaaggactcttgaccactggtcgtgtaagactcttattaaagaaaggagactcgggttgccgagggtactgtatgagagactgtgaaagaagacgaaatagcgttcgcggttgcattgtatctccagatatagctgtgttgaacctcatcattttgaggaaaggcgaataggatattcctgc

SEQ ID NO: 2319 - DNA, 416 bp, Cyanidium caldarium
  Clone ID: LIB190-046-Q1-E1-D6
cccacgcgtccgcccacgcgtccgcttatcggagaacaggcatgtctaactggaaggaacgactagactcgtggattggaaagagtagcagtgaatattccaaaggtggcaactcttcgccagaatggggttcatctcctaaattgggtatcagtccttcgaaactaagcaaaagtcatcgcgctcaagaagtttggagtaaaacagtgcatccttgggggcgttcttactcaggaaagatacgttatgacaccgtggataaggacacagagaaagacacaagtatatttgagatacatgatctgtccaagaaacagagtggcatccaataagaacagactttgtgagttttcaatacaatactgtgcttgttgttataattttcatacatgagtgtacatgctgttttgttggac

SEQ ID NO: 2320 - DNA, 420 bp, Cyanidium caldarium
  Clone ID: LIB190-046-Q1-E1-D7
cccacgcgtccgcgctggtcaagatggccttgtgcaagtcaacaaacatagaaaagtaaagagattgcaagaagataatattttgaatagagcactatcacaaccaggagatgtatttctgtgcttttgcaacatccagttgttggtgaatgcagaaagagctattataggaaatattacttgtccagaaagtatcgaattgtgtcgtctattagctggacatatagcggtttggttcgatgaacatttggatgactttcgtttggaagctatcttgggagcactattgtgtacttgttattgtgagtggaagcgttttgaaggagaattgggggtacaagaatggaatgaattggagaagatatcttccttagatacttggaagcttgtgcttggtacaagacaaagagtggataatat

SEQ ID NO: 2321 - DNA, 277 bp, Cyanidium caldarium
  Clone ID: LIB190-046-Q1-E1-E1
actgtagtcctcttttgcgcgccaaagatgcaacaactggaaatgaggcacatatagttatcgatgttggtaaattcttctatgaaagtgcactagagtggtttccaaaatatcaattgcgcaatatcgatgcagttttactgacgcatgaccacgcagatcatgtgaatggactagatgatttgagagattttactttgcatatgagagacaactgttgtccacttccagtatactgcgaatgacagacttttcgtagaatacaagcaagttttcc

SEQ ID NO: 2322 - DNA, 398 bp, Cyanidium caldarium
  unsure at all n locations
  Clone ID: LIB190-046-Q1-E1-E10
aggttccacaggtgaagtcatgggaatcgacttttcttatccagcggcatttgtgaaagcacaaatggcagcaggaactcctcttcccttggaaggaacgatattactttctttggctgaagaagataagaaccaagcagttgtcttagcccaagactttatagatttgggttttcgtattttagctactcgaggaacttatgtgcatctcatagcagaaggaatgaatccttctcaagtagaaatggcatttcaaatangagaaggacgtccaaatattgtggaccgcatcaagaatcgagaaatccaattgtttattatgacaccgggaatagacaaagataccgcaaatgagaaacaagtacgaaggacaagcgttgagtttaaagtgcctatga

SEQ ID NO: 2323 - DNA, 329 bp, Cyanidium caldarium
  Clone ID: LIB190-046-Q1-E1-E3
caacttttcagagtttcaattacatactcttggtacattcattatccatgaagtatgttattggggtagttatgtgccgtttctattgttggatgccattccgtactttcgaaggtggaaaatacaaagagacaaggttaatgatgcctccactcagtggaactgtattttaggagtattaagaaatcattttttgttagtgttgcctcttattattgtgacgcatcccttttttgcgtggatgggaacgcgagatgagttaccgctgccctctgtcggagagattgcttctcaagtgtttttattttttgtcatcgaagactttattt

SEQ ID NO: 2324 - DNA, 429 bp, Cyanidium caldarium
  Clone ID: LIB190-046-Q1-E1-E4
acccaagcgtccgcccacgcgtccggtaatatccaaagcaattcctgctgtcatagagaaacttgtttcgttgttatatgcaatgatagaacatcttccagtagaaagcaaagtagtaaagtcgtctctagcggaaatatgtagcggccttgacggcgcctcaagttgtgtaagctacaattggttgacgttgttaattttgccaggcgtagatatatttgcacatcgaagtcctgaattgctagctttgttgtggcgttgtggatggaaatatatgcagaatgatacttattctgttgaagatgcgaaggcaatgaacctggcttggatgcgaatttatatacgcttaatgggcatatcgaagatgagttctcctcaaacaagtgttcgtaaaaagtatttcgacacttttcatcataaaggtgccat

SEQ ID NO: 2325 - DNA, 416 bp, Cyanidium caldarium
  Clone ID: LIB190-046-Q1-E1-E9
gacccacacgtcagcccacgcgtccggtaacgttgtagaaatttcgtcttgttgggcggttcagtttgttttaagtaccatgtcagaggctccgcttttttcggatagacccataaatgtttgtgtaactggtgctgctggtcaaatagcttattcacttttgcctttgattgccggtggaaaagtatttggaccgcagcaacttgtgtctttaagattgctcgagattgaatctgcacttcctgtccttcaacgagttgttaaggagctcgaagattgtgcctttcctttggtacattccatttttacaacttcagacgcaaaggaagctttccgttcctgtaacattgccgtgctattatgtgcctttccaacgaaacaaggaatggaaagaaacgatttgctagaaaagaatg

SEQ ID NO: 2326 - DNA, 308 bp, Cyanidium caldarium
  Clone ID: LIB190-046-Q1-E1-F11
agcccacgcgtccgcccacgcgtccgcggacgcgtgggttcagtcattcatgtctgccccaaccaagcaaacaccttcaaagaaacttcgaggtgcggaaaaagccgtattggtatggtttttaatagatgccgctacccatctcttttgtgagctcccttttgtattccattctttaacaaccacggtgaaccaagcaacccattggtctgccatattatggaaggaatatgctaaagcggatccacgttggggtagatttcatgactgcacggtggccttggaagtgcctacctctaatttaaggg

SEQ ID NO: 2327 - DNA, 406 bp, Cyanidium caldarium
  Clone ID: LIB190-046-Q1-E1-F3
aagttatgaggagaaggaaagttgcaagtcaaagcaactcatcctcgatatgctcttggaaaattcggcaggtctgtttcagaatgtttttccgtgacatgtctatgtggaaaagaagagagaggatattatatctcaaagatgatctacccgtgatggattacaaattcatcttgggtaatttctgaacattcatttggtttccttatattggaaaactccgatgaaaagttcgcagataaattcagtaaaaagtataacagcagaatactctaactggaaacatatatcgaaatttgcgttatgtgaaaaaacgagtggagttttcaaagaaccgttgcagtcttgatgtatcttacgttcattagaatagagaaatgagtaacagaaagaaactttgcagaag

SEQ ID NO: 2328 - DNA, 295 bp, Cyanidium caldarium
  Clone ID: LIB190-046-Q1-E1-F5
acccacgagtcaagtttccaatgctggactccatatgttgaccaaaatgatggctttggaatggggtccttatgatatgcataccaatgccatcgtacctatggtaatttggacagaaatgggacagcacgtgtggggtgctcctgagaaatactatctatgttggcatgtattctaccccatcgttttgtacatcctgtagatgttacatacttgaacgtacttttggctggacaagtctcggatatgatttgtggacagagtattgctgtgaatggtggattaattgtgcatt

SEQ ID NO: 2329 - DNA, 244 bp, Cyanidium caldarium
  Clone ID: LIB190-046-Q1-E1-G1
gacacagcctgactttcatggaatagactttgtaacgcttttggtctatttgagctatatgtcgattatctccctggcgtttacttttctgactggttatatcggatttcttgcatgtttctggtttacgcgtaaaatatattctgctattcgtgtggactgagattgctttttcgatgtttttttgagagaaaagataaagttggcatattgagagacttgtaaaaaaaaaaacaaaccaaag

SEQ ID NO: 2330 - DNA, 291 bp, Cyanidium caldarium
  Clone ID: LIB190-046-Q1-E1-G10
ggctcgacccacacgtcagcggacgcgtggggaaagtccgagttccaactcatcgaaacagtcgcttcaagatatagtagcaaccagtcttcgagatccacgagtggttgattggtgcaaaattattttacaaggagttactatcctagtctttcctttggtatctcatttaccatctggtgttgtgttcttctggacggtgaactctttgttgaattcattgcagcagtttttgctaataggtagaggaagacgatatatcggacttcaggaaagaacagaattgtttgc

SEQ ID NO: 2331 - DNA, 162 bp, Cyanidium caldarium
  Clone ID: LIB190-046-Q1-E1-G12
gacccacacgtaagcttgttgcagtcatggtgttggagtatataaaggcaatggtcgtcaccaaataaataaagaagtgtaaaaaaatagaaaaacataaaaaacaaaaaaaaaatgtaagaaatggataaaataaaaaaccaataagggaagtcgctccag

SEQ ID NO: 2332 - DNA, 386 bp, Cyanidium caldarium
  unsure at all n locations
  Clone ID: LIB190-046-Q1-E1-G3
gtgtttctaccagatcaaggctaacatttggtgtaactgcttcaattgcaaaggcttggtctgacctggatcatttacgtaatggcaaggataaagcgctcttgaatttgccccaagttttcaaaagttccaaggacaanggcaatcttcacgctcgtcaaggacaaagttctattgaagccccaggtaaagctgagagaattgcaagacaaagagcaagatgtatccgtagtgtccaagatgacgtcgtaccagaggaacccaactttctagcaaaggttcccaaacgggagcgagatgggagagcagcttttcgtccttcaaagaagtcaaacccgttctccctcggagccactttagaagatgtccttctcaaaattccgaac

SEQ ID NO: 2333 - DNA, 450 bp, Cyanidium caldarium
  Clone ID: LIB190-046-Q1-E1-G4
cgggccggcccacgcgtccacccaagcgtccgaaggattagaagatctgttgagcttggcagactatgttatcacaaatgcagaatttcctttggagtattttggtcagttgaatacgttaaatggcttggaaaagcttctggattcttatcctgccagatttgtcatatctacgttagggaaggaaggatgcgttctaatgagtcgtctggatgattcggaagcagaacaaacgcagaaaacaaccacaaatttctctacgtttcctattatggcagtaaagacaacatttccgttgccgacgctttgcagaacagaatgtatcccaaagtatcgagtgatagactgtccttgctggcctgtcgaaagtgttgtcgatacaactggagctggagacgcctttattggaggtattatttatgccatacttcaccattttagtcaagaaca

SEQ ID NO: 2334 - DNA, 426 bp, Cyanidium caldarium
  Clone ID: LIB190-046-Q1-E1-H1
agtcatccaactcagcgaaacagcaataactgtgaaaatgcagtaaactagcagtatgacggaaagaccccacaattcctgactagataggtttaaggaggagagagaatcatgaagtataagaagtggggtaagagatgaaagaccactgcatgaggataaggaatctaactgagtaaggaaaataagcttaagctactttggctggggaagtaaagcctaagaaagagtaaattatgcaagcaaaggcatgagagaagtataatagcacaagcatgcttgaagaaaaagaaagagatttcagaaagggaagaaaagtcagctatagagaacaagtgaaggagaactcacaaagaagagagcaccgaacgatcgaagaagaaactttgggggtaacacgttaatgtggtgttagagaacgtatca

SEQ ID NO: 2335 - DNA, 363 bp, Cyanidium caldarium
  Clone ID: LIB190-046-Q1-E1-H11
aggttgcgtgacgccgtcggttggtctttgcgtgggatcttcatggctgtcaagagcaaacgtgtacgcaacgtaagtaagggcaaaaagccgactatcaactacaccatcgactgtagtaatccagtagaggacggtatattcgatgttgcttctttcgagaagtttttacaagatcgcataaaggttgatggtaaacccggcaacttgggaaacgtaattaaagttactagaaaggatgccaaagtggaagtgtcatcagagattcgactttcgaaacgctacttgaaatacttgacaaagaaatatctgaagaaacaacagcttcctgaatggctccacgtaattgcatcgagcaaaaat

SEQ ID NO: 2336 - DNA, 386 bp, Cyanidium caldarium
  unsure at all n locations
  Clone ID: LIB190-046-Q1-E1-H12
gacccacacgtccggttgtaagagactaggtgcagctatatttgtcgatcagtcaccattgcaattgcagtcgagtgatggctcgtggaaacttgggtccaaaaccttgtccgattatgcttctctggttcatttggagaccttattaaagatacaaccagaagctgtctatcaacaaaatgtgcacgattgtctgttccgtgagccaagtaaganagaaatcgactatttcgtctctctctccaaagaagcagacgcagagtttttggccaagttgatcaacgaccacgcaatggccgactggagaccgactttgccgcatttgcaatgtccttgtctcgttatctatggagaacaaagtaaaatatttcctgaagatgcaactt

SEQ ID NO: 2337 - DNA, 447 bp, Cyanidium caldarium
  unsure at all n locations
  Clone ID: LIB190-046-Q1-E1-H2
ggtataggtcacgcgggccgagccacgcgtcaggatgaaatgcagagatctctagagaaaggcaagaaagaaaagaaaggaagacacagtaaatgaggcgagaaagcatangaagtgaaacggattacgaacccgtgtagtctaagcagtaaaagaaagaatgagtaagaaaaaaaggagtcattccaccaggggagtaaaggcgcaagaaagaaacccaaagcaattgacgggaatcggaaaaaggggtggatcacgtaaattaatccgatataaaccgagaaccttacctctccaagaaggtgttgcacggctgtcgaaagaacgtgctgtgaagtgagagaacgtacgagaaagccaagtgaggaaaagaaggcaagtagagggcggcccgagaaaggagaaggcgtaagacgtgatacagagaaagaggaaaggatgaaatgc

SEQ ID NO: 2338 - DNA, 446 bp, Cyanidium caldarium
  unsure at all n locations
  Clone ID: LIB190-046-Q1-E1-H3
cgggtcgacccagcgtcgagggaacggtaacttgaactttggaaaccaaaagggaatttcgggaaccaatgggaggaaaaattataaaattggttgcaaaaattcaacataatcccaatggcgttcccttcaagtttaataattaaaaatgctgccaatgtattccaagcattgggcgatattcttgggagttgtttcaaggaaaatctcgctcagtcatcanctgaacattcgtcatccgaaaactagttgcaataactgaacaatattttgcaaaagagttttgaacatcaacatgaagacaatgtgcagatttttagaaagaccttgttcaagaaacatggcagcggatcattattgaagcaacggactttacagcatttcgacagcgctgtgaattgttggcaaattcctcgtctactttgccacaagattttcgacagtct

SEQ ID NO: 2339 - DNA, 331 bp, Cyanidium caldarium
  Clone ID: LIB190-046-Q1-E1-H4
aattcacgaggaacgagcgtgaacgaaggaggaatctcaagtaatcgaggaagaaaaagcttcggtgaaagcgtgaacggattttgtacacactgcccgtcaagttctggaagtgtgctaagaataagcaggaaaaaaaaaaaaaaaaaaaaaaaaaaaaaaaaaaaaaaaaaaaaaaaaaaaaaaaaataaaaaaaaaaaaaaaaaaaaaaaaaaaacaaaaaaaacaaaaaaaataaaaaaaaaaaataaaaacaataaaaaataacataaaaaaacaataaaaaaaaaaatcacaatactaaacacaaaacaagtaaaagggcagcaa

SEQ ID NO: 2340 - DNA, 424 bp, Cyanidium caldarium
  Clone ID: LIB190-046-Q1-E1-H5
acccacgcgtccgattttttgttgtggagtcgggttgtttggtagtacagccttaattttgtgggtgttataaatcatccaaggctaaatacgtaaagaggaccgaatcagggtaagaggtagaggagcaagaagagaagagagaatgctgggtggagtagcgaaacaagagaagggaagtaaaaggtaagaaagaggaaaggtttacgagagaaggaagtagaaagaagagagtgtaaggcggcgtcataatagaaatccgaaaggagtagaagaaaagagagagaagaaagaaaagaagagaaaaagcccagaagccaagataaggtatcaaagtaaagaaagaacgaaaacgagaagaagagacggtacgcttagaagcagcaaaccagagaggaaagcgttaaagcatgaaagaaaagaa

SEQ ID NO: 2341 - DNA, 261 bp, Cyanidium caldarium
  Clone ID: LIB190-047-Q1-E1-A1
agactgcacgtggacacggcatctaactgagtaagtgaaatagactatgacgaacttggctggggaagtagagcctaacagtgagtaaattacgcatgcaaaggctattacgagaagtagtaatagcagttagcatgacttgtaacgaaagaagactcgagatttcaaatgcgcgaatgaatactcagcgttatcaaacaagtgtacgtgaactcatggagcagttatcaccgtacgatcgaataatcaaccttgggggta

SEQ ID NO: 2342 - DNA, 387 bp, Cyanidium caldarium
  Clone ID: LIB190-047-Q1-E1-A10
cttcggccaaggcgtcggcccacgcttccgaaaacttcaagtgattgaaaccttctcgtctcaagatattatagctgatgcgtttgctggagtcggaccttttgtgattccagctgcaaaacttaaacgctgtgttgcctttggaaatgacctgaatcccgtatcagttgaatttatgtcgaggaatattctaagaaatggtgtatctgaattggttacaacatattgtttagatgcctggtcctttatagaacagcctatacgaaaagaaatatattttacgaaacttattatgaactatccttcgagtagcagtgatttcctacgtgtcctcaaaggtctgtacacaggtcgagaaaatgcgccgctacctactagatattgtta

SEQ ID NO: 2343 - DNA, 405 bp, Cyanidium caldarium
  Clone ID: LIB190-047-Q1-E1-A11
gacccacgcgtcagcggacgcttgggcggacgcttgggggaaaaatgaccaccacaacgacaggaaaaagaattgcgtattatgtgcaccgttggacagcaaccttgtacaagtttcttcaaaagattaccaacctagtattctcttctttattccggagcaacaaaacatattccataccttgtaaagacttggaacagtttttccatacgtcgttgcatcaaggtccacaaaccgtacagcaactcaagtcaagcctgcaacacacacccaactgttctgtcatctatcatatgatacaaaataacccgggatttgatgaagaatgggtgagcaattgtatcttggaaaagacagtgaagttgcgtcaaagtccggaaaaggtcaaagagtaagcactgtttt

SEQ ID NO: 2344 - DNA, 402 bp, Cyanidium caldarium
  Clone ID: LIB190-047-Q1-E1-A12
gaacgtcaaaaaaaattgaaggaagaaaaggagttggaaaaaacccgggtaaaaaaagatgaggaggatgacaatattctttgaaaataattttgttggataataaaagataaagaatgtttggtggattgtatggaagttttgcaatgagtagaacgccaacaaggaatatcgttatgcgtatgtgtatacggaacggcaatggattgtaactgatagcaaagctaagccttgcggaacttttcaaaagccatgttccttttttttcgatacgaattttaatttggacaacctcaagaggtttccaaaaaagtagggaaaagtcaggacagacacttggaagtgtcgcactccttggcagatgtgtggttggtttcccgccttgtatggaaagttgtgctg

SEQ ID NO: 2345 - DNA, 410 bp, Cyanidium caldarium
  Clone ID: LIB190-047-Q1-E1-A2
agcaaacatttagaacaaggtatgaaggaagcggaaagaacgcgaacggaaggacaagaattgcacaatgctttcttccaagattctcaaaccttaagccgagactatgtgaaacgaagagatttatcttgtgagaaagcaactcaagaattgacgagttgtaagaacttgactcaagaatgtatcgaaaaaggcatagaaaaggacacaagcacagcagcaaaggtgaaagatggattatctgaagaaaagtcagctttgcaagatttccataagaagcaagtagagtttgtcgataatatagcgggttccgtagatgaattgatgacttctggattgcgagtagatgaaccgactagtactactcctcgtaagagacagtggaattatcctcaagaattgggacgaac

SEQ ID NO: 2346 - DNA, 390 bp, Cyanidium caldarium
  Clone ID: LIB190-047-Q1-E1-A3
ccggcccaagcgtcaggaaaaagttagctcagagactaaaacccaatggaattcttcatttgtttgtctatggaaaatatggaagatgggaaatccgtttgatgcaacgagctattcgattgctattaggaaaggaaaaggaaaactggaaacaaggagtggacattggacgcaaattattttctcgtcttccaccagataaccgaatacgcaagagagaagaggaaagatggtcaagagacaataagcaagatgcgacatttgccgatatgtatgttcacccgcaagaagtggattttactattgattccttatttcatatgatcgacagtagcaacttgcagtttttaggattctcaaatcctcaagtatttgatatttggagactga

SEQ ID NO: 2347 - DNA, 382 bp, Cyanidium caldarium
  Clone ID: LIB190-047-Q1-E1-A5
cccacacgtccgatcaagtggtagcgtacaagcgttcagaagaagaaaaatggagccaagcaggtgaaaaaagatggcagttattcaaaagactggaaaaagagaatgctactgcccgctttttcttacaaaacaaagctatttttccaggtgctagagttttggaactggcttgtggttccggagaaaccactttgcaagtagctgcgaaagtaagaggttattctgtaccttcaggagagaccacgggggaagtggtggataaattgttggatatattacgtccatctagtcaccaggaagggaaactggatggtaccagcaatagtggttcggtagtaggtgtagatatcgccaaaggaatgctgaatgtgttcaaaag

SEQ ID NO: 2348 - DNA, 397 bp, Cyanidium caldarium
  Clone ID: LIB190-047-Q1-E1-A6
gacccacacgtaagatcagatgatagagaacggacgttcatgagtaacaggatgaagccagggaggtgatgaagaatggcagatattcgaaatactggtaagagagagtgctactgcccgctttttcttacagtacatggctatttttccaggtgctagagttttggaactggcttgtggttccggagaaaccactttgcaagtagctgcgaaagtaagaggttattctgtaccttcaggagagaccacgggggaagtggtggataaattgttggatatattacgtccatctagtcaccacgaagggaaactggatggtaccagcaatagtggttcggtagtacgtgtagatatcgccaaaggaatgctgaatgtgttcaaaagcacgttggaaaat

SEQ ID NO: 2349 - DNA, 370 bp, Cyanidium caldarium
  Clone ID: LIB190-047-Q1-E1-A7
cggacgcgtgggaacaacatgccacagcattcatctttgtccatggttgcctctttgcgttccaagctcctttcaactagactcgagctgtcgcaattgcaacaacaaagaaaagagttggaagaacaagtgcaagtattgaaccaaaccaatcaacagttggcatccaccgtcaaagaatataaaacgagaatatacgagttggagcaaacagcagatgctcaaaaacaacaaatagagtcgctcgaagcctgtaaaatacaaatgcaagaagaaatagagtcattggagaaacatataggaagtggatactttaatccgagatatacaaaagtgttgcatctcaaaggaggacctcctctttccaaaa

SEQ ID NO: 2350 - DNA, 407 bp, Cyanidium caldarium
  Clone ID: LIB190-047-Q1-E1-A8
agcccacgcgtccgcccacgcgtccgaaccaatgtcgcgcaaaggttgcggagtttgctgctcttgctggagatttcaatcgtgctattgacttgtttgaaaaggttgcctccgtatcccttgaaaataagctactccgctatggtgccaaagagtttcttctccgagctggactttgcagagtctgtctcggagacgaagtgggtgcttctcgtgctttggaaaagtacaaatccttagattccagttttaatgacagtcgtgaagccaagcttcttgagaaagtaattttggcagttcaagaaaatgatgaagaagcgttcactgatgcagttgcggagtacgattctttgtccaagcttgatccgtggaagacgtctatcttgttgaaaattaagaaaaatctc

SEQ ID NO: 2351 - DNA, 346 bp, Cyanidium caldarium
  Clone ID: LIB190-047-Q1-E1-A9
attccgggctgaccacgccgtcagcacaatatttgtcttctttaacaagtattattcgtgaccaactaagaagactgtctttgtccacttttattgtggcctatcctaattctggacaagtctatgatactgtgagaaaagagtggagtcgagaaaataatatttctatagaacactgggttgattatgtagttggatgtggtgcagatatcaatggtggttgttgtcgtacaactccttagcatattcagtgtctgagaaatcgagtgagttgttctccaaaagacgaacggaacacaagtctactatatgcttgaatctcatacgatgaaaacacctgcggcta

SEQ ID NO: 2352 - DNA, 325 bp, Cyanidium caldarium
  Clone ID: LIB190-047-Q1-E1-B1
agagcaagcgtgaaccgtgagggtagttcatcatggatgagacaacacgtcaagatggtgttagtgcttctctttggactgttcgtcgcttcctctacacagttattttagcattctctggcatcagcattggtttggattgacgtaaagcagacaagatatggaacgacagcttattctatgatgggaagtacattaccttttgtgctgattctgccgcttctgttgtataaggaggggaccatggagcgtgtagatatgtcatggcgttggcgtctataagtttgattctagtccttttcttgtggctttttacatttgtaga

SEQ ID NO: 2353 - DNA, 424 bp, Cyanidium caldarium
  Clone ID: LIB190-047-Q1-E1-B10
gacccacgcgttcaggaaacagacagatggccaacgctggtcaaaatggccttgtgcaattcaacaaacatagaaaagtaaagagattgcaagaagataatattttgaatagagcactatcacaaccaggagatgtatttctgtgcttttgcaacatccagttgttggtgaatgcagaaagagctattataggaaatattacttgtccagaaagtatcgaattgtgtcgtctattagctggacatatagcagtttggttcgatgaacatttggatgactttcgtttggaagctatcttgggagcactattgtgtacttgttattgtgagtggaagcgttttgaaggagaattgggggtacaagaatggaatgaattggagaagatatcttccttagatacttggaagcttgtgcttggtacaag

SEQ ID NO: 2354 - DNA, 389 bp, Cyanidium caldarium
  Clone ID: LIB190-047-Q1-E1-B12
cccacgcttcagattagctaaaggaaatggtcttccaaggtcggaaggaattacttcaaaaagggtgcaggataataaaggtcgtcaaatgactgcgcctgatcagaatcgacaaggccttggaggtgctccttcttcacaaggacggaatcgccaaggtgaggaaccagcaggaggcagaggaccctccaagtggagaggaggttcttctgatagaggaggaggaggaggtagaggaggaggcagaggaaatagtcgaggaagcagtcgcggtggtagttttcgaggtccaatgaataataatagacaggaaagagatgcttcacaaggtttcgccaactctgcaaagcgtggtgggagagaccgaacaaatgataaaagtgcgacta

SEQ ID NO: 2355 - DNA, 400 bp, Cyanidium caldarium
  Clone ID: LIB190-047-Q1-E1-B2
gacccacgcgtcaggatatttctcgtcttctttcccctcttctacaaaatgtggaacagccaaatgactcgtttatagcacggtattatgcgcaggaaggaagtcgccttggaacaaagcatcaggagacttttcgcaagttaggaactgagagcttggaggatacagttgcggaagccctttatgaactttataagatgatgactgtgtggaatcaggaccttgaagcacgtgagcaccagtcgaatacgaaggaagagctcgaaaacacagcaaagtctcacgcccttttctgctatattctaaaaatattgaagaaatttttgcaactgtggggtgtcgaatctttttcggacagtggaaagagagttttggcaatatacgactcgttacagagctt

SEQ ID NO: 2356 - DNA, 408 bp, Cyanidium caldarium
  Clone ID: LIB190-047-Q1-E1-B3
agccaacgcgtccgcaattatgagaatacgtcgtttgaacgaacaaggagaagaagaagacaaagaagacgaacaagaagaaatgcaaagtgaagagttgacaaggagttgttcggaatttcttctttcgtattcttccgaaatggtagactgtataacctcattgagcgatgacgacgaagagaaagagtcgttcgtggcttctcgacttggacaaaaactgggaaagatgctggaaagttatgcctcgcattgtagtggaaaaaataagactttgttgtttcgtcatgttccggacgacacaccaacgaagcattggcttatcgacaagttcaagttaccaacgagaaccttacgggttaccttgtcacctggagttcgtcgaagaaggaagaataagagttttgc

SEQ ID NO: 2357 - DNA, 421 bp, Cyanidium caldarium
  Clone ID: LIB190-047-Q1-E1-B5
cccggctcgacccacacgtcagcccacgcgtccgaaggtgatacaagggatactgtcttagttccagtacatcatatatgcaaggaaaatagatatgttcggctaccagagttgttcggtattccgtttgtcatgagagttgcctcttgtggagagccggtgggtcaattattgcatcgagttggagaatatttgaaagccaaagaggaggagataaagtcgtggaagttgtatgaaatcagggatggtttattttcttcattagatgacatggaaaaagtatgggttccagaacctctgtcggatgaccgaggagagttttcggtttccttaggtttggaacataaagatgagaatgcaaaacgttggcagtcacctttccccaaatcttttatggacaaacccttaaagattcggggtt

SEQ ID NO: 2358 - DNA, 399 bp, Cyanidium caldarium
  Clone ID: LIB190-047-Q1-E1-B6
aggtttgttgttggtctgtttgtgtttgttcccactatccaactccgttcaacaagatgaagcgtttgttcctattggtcctcttcgtgaaaaggatgagcacgcaacacagccttcacaacctgttgtaaagccacatggtagcaaacactggaagccgctccagtgtactcccaacaaggaaaaagcagaggcattgatacaaaaggcacaaaatagtttgagtgcgcttttctcaaaccggttgttcaagcatatagacgtcgaaagttgtcaagagtttagagtggtcgaaataaagcttgacgaaaaaggtttgaatttggataatggacaagagcatatcaaggaaagctttagaatattggcagagtttctcgaccaatgtggagcgaagaa

SEQ ID NO: 2359 - DNA, 393 bp, Cyanidium caldarium
  Clone ID: LIB190-047-Q1-E1-B8
agcccacgcgtccgtggatcgattcctcgtgacggagatgaagtcttatctctcgtcttcttctgtttgttgttgggtgccttgtcatcacttgcctcgttctagtggatttcacacctctcttttttggagagcgaattatatgtatgaacaacgaatattgaaagaaagttttatttcacgaaataattgactaggttgagagcgaatatgaatgtacgcaagcctcatcgttttgtaataagagtcgaatgcatagccagcaacttgcacagtaaaatgcggcgtcttctaacagtaatggatcgtagcttagacagaggatggaataggcaccagaaagcagctgttatttggataactatttcctgtttgatactttctccgggtact

SEQ ID NO: 2360 - DNA, 342 bp, Cyanidium caldarium
  Clone ID: LIB190-047-Q1-E1-B9
atttttaaccaaccttaatacgcaaatttaacccctagtagaaaaacctcaaccggaacttccgaaggagctaccaaaggactttctgaaaggtaagtaccatatagcttgttgttagtgaaaaccaattttgcagatttaaacctctgtcaaaaacatcttgccaacatgtttcgttggttcatgttattctcagaatacaataagtgccgaattcaaatgactatatatagaaagtgtaaagaaagacgatacaaggaaataagagaacgcctgtgggagtgggatgaaggaatattccgctcgttaaactctaagtctcgacagcttctagttgaagaa

SEQ ID NO: 2361 - DNA, 398 bp, Cyanidium caldarium
  Clone ID: LIB190-047-Q1-E1-C1
agaacaccgagtccatcggcatctgcctattctcgtgaacaagtacagcgtggtggttatggagaatatcaatctcaacaatctgctagttactatgtaaccaagtattgcaagaaagcagtacaacaagtaacttatacctcatgttctacttattacccatcgcaaactgtagaacagaagacttgctacaagacagtagcagttcctacagagtatcagaaatattgttacaagcaagtggaacaggagcaagttgttcaaaagagctgtcccacttattattcagtacaaaaggtgaaatatcagagctgccctacttatatcacgcagccaactatcatacccaagtactgcagtatgtcggtctctgaagagtatgtacagcaacagcaatg

SEQ ID NO: 2362 - DNA, 396 bp, Cyanidium caldarium
  Clone ID: LIB190-047-Q1-E1-C11
cgcgtcagcccacgcgtccgagaatatggtcagtctttgagtgccaatgtgtacctttgtcgtccagaaaccaaaaatatgctatttggcccacgtgagcagaaacagcgcattcaacaaacgcattggttttgttgtgtacctttccacagtcatcactggaacttttgggaagactgtggactgaaaaatttatcttctcatctcgtgggacaaagaaacaacgacaacgacgacacttttcttatttctgtgaatatacaagataatactcgatctccatagtgaacagtagactagtattttttggaataacaactacgccttgtaaaaatatggtttctctagtcaaaatgaggtggcttcgctggtcttatgaaggggtacagttgctga

SEQ ID NO: 2363 - DNA, 420 bp, Cyanidium caldarium
  Clone ID: LIB190-047-Q1-E1-C12
acccagcgtcagaattattttcaattgagaaatttttgggttgtggggaagaattttcagatagaaacccctcaagttggagtccctattcacttgaagcaaacgtgtgtgacataaaacaacgcaatcaacagccacaactattggaataggttgaatgatatacaatgctcctcaagcaaaaaatatagaagaataaagcgagtaaaacgtttatctctagcacaactttttataccagcaacgttgttggaacgcttcaggggatcatcgatacttgattaattcagaatggactacgtttatctcaccctccgagaatccttccaaaacatacaaacattcgagtgctttggtttcggttaaacgaaaaattccctccagccaaatccgttttgttccgagccaactgaagaacct

SEQ ID NO: 2364 - DNA, 272 bp, Cyanidium caldarium
  Clone ID: LIB190-047-Q1-E1-C3
tgcatgatgataaggaatctaactgagtaaggaaaataagcttaagctagtttggctggggaactaaagcctaagaaagagtatattaggcaagcaaaggcatgagagaagtataatagcagaagcatgcttgaataaaaagaatcatatttcataaagggaataaatatcagctatagataacaggtgaaggagaactcaaccagatgatagcacccaacgatctaataagaaactttggtggtaacatgttaatcttgtgttagagaacg

SEQ ID NO: 2365 - DNA, 412 bp, Cyanidium caldarium
  Clone ID: LIB190-047-Q1-E1-C4
aggcatgttggaattgaaaggagggtcgacgagctcagcttgaagaacaaagaacttgcgtggggttggacgttatttatgaacttggactctattgacacaggaattaatgctccttttgacccgtttgcagacgcctcacgtggagaggacgcagcagtaaccaaaaatatagtgcatattcgcttgcaacaaagaaacggccgcaagtgcttgacgacgattcaagggcttgacacaaaattggatttgaataaaattacaaaggccttcaaaaaggagttttgttgcaacggttgtgtcgtagacgacgcagaactgggaagagtcatccaactgcaaggagaccaagaggataaagtcaaaaagtttctagttcaaggagaaattagctgaaaaagacctgataaag

SEQ ID NO: 2366 - DNA, 395 bp, Cyanidium caldarium
  Clone ID: LIB190-047-Q1-E1-C5
cggacgcgtgggacagagtaggaagaaaagagaagccatggatgtggagaacccaccgatagttttatgttcgggtctttgtaagagtaacatttaccgcagttggatgaacaatagtgagagtgagcattggagaaatacgaatatttgttgtcctcgtcgaggtcggctttttcatgggagttcaatgacggaagagtctcctgattccgtaccttatctattatctgagcttcgttctttgatttcttatgtttcaggcaagcctgtgctttgtaaagggtctgctagcttcattcgtgatcgtttacggacgttgatagctttttcttcatcttttgtggaaagggacaacagttttatggatttcaccggtttatccaactacacgcacg

SEQ ID NO: 2367 - DNA, 380 bp, Cyanidium caldarium
  Clone ID: LIB190-047-Q1-E1-C6
agcggacgcgtggggaaaagattgcctactgaaatgattcaaataaggactgtattaaaagtactagacaactcaggaccaaaaacagcaagatgtataggaattcttggaccacctaaaaagtttgctactgtcggtgacaagattgtagttactgcagagggaaaagtttaccacggaatcgtcgcctgttgtaaggtggaaaagaagagaccggacggttcctttgtaagaatcgaccagaacggagtcattctagtagattcaagtggaaagccagtgggaaacagagtatttggtgttttgagcagtagagtgaagcaaccggaaattctctccttgggacgcgtcaaaaccatgtaagctttaatagttaggtg

SEQ ID NO: 2368 - DNA, 380 bp, Cyanidium caldarium
  Clone ID: LIB190-047-Q1-E1-C8
gacccacacgtcagcccacgcgtccgcccacgcgtccgcccacgcgtccgaaccagcgtgtgacatggctacttcggaaataaacaaccaccatcaggaagaacaaccattcaaggagtccgcgtcgaaagaagtcaacgacaagttcgaccaaacctatgccgaaagcgttgccaaggaaatcatagaaagcaccgtgggagaagagaaatacgaacacacaaagacagtggaatggaccaatcaaatgtgtgaaaaaatactgaacaagttgttggaactgcaaaaggctttcaaatataaacgtgggtgggtctatcctcaggtaacgtttttacatttagcgatagccactagtctcttgttccttattgcaaaag

SEQ ID NO: 2369 - DNA, 368 bp, Cyanidium caldarium
  Clone ID: LIB190-047-Q1-E1-C9
cacgcgtcagagcagtactgaagaccgacacaggtactcgaggagaaaggagacccaaattaaggtgagagaatggacgataaggaactaggcaaaaggatatggtatctgcggtagaacatatgaaagaagcagcaccgactgtttagcaaaaacacagcactctgcagaaaagagaaaatgtaaagtatagagtgtgcggcctgccaaatagtagagaagaaatcgatgaaagtgaaagcgagtaaaagatgaggtatagagaatggcggtcctaactgtaaggatccaaaggtagcgaagtacatagacgtttgaaaggcgtccagtatgaaaggagaaatcagtgtagcactgtctagtcgtcc

SEQ ID NO: 2370 - DNA, 409 bp, Cyanidium caldarium
  Clone ID: LIB190-047-Q1-E1-D1
agcccacgcgtccgcccacgcgtccgcattgctcgaagctttggccttggagaagcttggcaaagcctaagtagaaggaagaagaagagagaacaggcccaaagaagaagaaagaatagtggatgtcatagtatggcagaagaagaaagctctcaagtttttcacgccaaactattgctaaatcaaggctccaaagattggcttcgttcgttgggaaacttgctggaaacttttacaacggaagaggtaaaggtagcaattcggtagttgttcacgtagttcatgtgtaggatgaagaaaagttgagtactatatctcgtcacttggaacgcgatgctacagaaatatcgagggtaggagtcttgacacggattttattgaacaactaaactattaaagtcactgcaaa

SEQ ID NO: 2371 - DNA, 227 bp, Cyanidium caldarium
  Clone ID: LIB190-047-Q1-E1-D10
acctacgcgtcaggaactaggcagaaggatatggtatctgcggtagaacatatgaaagaagcagcaccgactgtttagcataaacacagcactctgcagaaaagagaaaatgtaaagtacagagtgtgcggcctgccaaatagtagagaagaaatcgattaaagtgaaagcgagtaaaagatgatgtatacagaatggcggtcctaagcgtaaggatccaaaggtag

SEQ ID NO: 2372 - DNA, 150 bp, Cyanidium caldarium
  Clone ID: LIB190-047-Q1-E1-D2
gaccacgcgtcaggaatagatgaggaaagaaagatcaaggaagtaagagtaagagaaggagtaatgtgaatgaaagcaggaaagtatttgaagaagagagtgtaaagcgcgtaccttttgcataatgtcccagcgagtgaaagaggaagc

SEQ ID NO: 2373 - DNA, 251 bp, Cyanidium caldarium
  Clone ID: LIB190-047-Q1-E1-D3
gacccacgcgtcaggtgactttctttcagaagatattttcagttgctcctctcaatttcgaagaatggatggcagtagtgtggttatcgtttcctgtgattcttttggatgaaatgctcaagtttgtttcaagaaagttgattcaaggcaatataaagaaaccaagaatttgacaagattgttggtggtgctcaacttttggactggaacaattccctggtcgcctaaaataaaaaatttcctcaagtctc

SEQ ID NO: 2374 - DNA, 399 bp, Cyanidium caldarium
  Clone ID: LIB190-047-Q1-E1-D4
aggtgaggaagcaatgacgacaactgccagtgctgcagcaagggctatcgaaagaagaaaacggatactgagtgatagttcacagcgtcttactatagctagtggttcttccctagaaggcaacacaaaaaatattgagaaactgaattcggattcttcgaaacaacaagcgaaggaagactccccgttacaagggaatgagacgagagaaacccagcaagacgcaagtgatgtgattggaacccagcgcttggttccacagtcggaacaaaataagcttacaaacacaaaatttacagttggaggagcatttgatggtttttcgatgtttaagcgtctctctcaaatttccgggacacttggttcctcgagagtggacaacttattccgttccgtgtg

SEQ ID NO: 2375 - DNA, 387 bp, Cyanidium caldarium
  Clone ID: LIB190-047-Q1-E1-D6
agcccacgcgtccgctggaatttctctgactgttctttttcaagtttttcgtcgtattctggaaaggacagtaatcgaggttggttgataatgatatgtccttctgccgttgacgtggaagccatggagaaaatagtcgacaaagagtcgccattcttaaataaagatgctcgtccagttatactggtgaatcccaatctagttgatatgggagcaacaggtttaggcttcaacgcaagacagctaagacaacgcttattgagcacgtttgaatccatctacttccttcgagtgtattctgccggagttgtggttcgtcagtatccctttgagtggagtatttggttggaaataaccaacgaagacgaaaatacttcttccgactct

SEQ ID NO: 2376 - DNA, 367 bp, Cyanidium caldarium
  Clone ID: LIB190-047-Q1-E1-D9
acgcgtcagcggacgcgtgggccggacgcgtgggttttacaagcaatggcaccataagaacgtagcaaaccatagagtcgttcgtctaaagcaggcctgcagtttcctgttggaagagtgagtcgttttctcaaaaacggtaactatgccgaacgagtatgagctggagcccgattttatttggcagcagttttggaatatctaaccggtgacaatctttgaattggctggaaatgcagcacgtgctaatcagacgactcgacttgttcctcgccacagtgaacatgcagtgcgcaccgactaagacgttgaataacgctgctctgtggagtgactattgccacgggaggtgttttaccatacgttc

SEQ ID NO: 2377 - DNA, 405 bp, Cyanidium caldarium
  Clone ID: LIB190-047-Q1-E1-E1
aggagaaaaggctttgagaaatcggacttgtctttgctgccttcgtccagttacaatatcagtgtttcctgtcattgtttggacttttcgagaaatgtcatgctttggaagagaccaagacaagcttgtttataagcctcgtgtaatcttaataactggaggtgcagggtttatcggttcacacgtcgtctcttatttgctccgggaatatccggaatatttaattataaactatgacaagttagattattgtgcttcgttgaaaaacttgagtgacgttgcccactatccaaactatcgttttgtcaagggagacattttatccgaagatctcgtcagttacgtgctcgaaagtcatagcgtagatactgtcattcatatggctgctcaaactcatgtagatgc

SEQ ID NO: 2378 - DNA, 382 bp, Cyanidium caldarium
  Clone ID: LIB190-047-Q1-E1-E10
ggttacaagtaggagacgaagcacctgactttgagttgaaagaccacgacggtaatatagttaaattgagcgagttcaaaggaaaatatcctgtagtcctattcttttatcgcaaggacaagacgtatggctgcacacgtgaagcttgcagtttccgagataagatgtcggaatttaacgaacttaatgcgaaagttttcggtgtgagttcggacagtgtagagtctcacaagtcgtttgccgatgaacagaagttgacgtttcccttattatctgatgaatgcggtaaagtactcaagctatacgcgtgtatcaaagagcatgtttactatgcctggtcgctgcacttatgtcattggtccggatggtattgtaccacaca

SEQ ID NO: 2379 - DNA, 414 bp, Cyanidium caldarium
  unsure at all n locations
  Clone ID: LIB190-047-Q1-E1-E12
cacgcgtcaggaaagaggcaaatacgggaaagcagtaaaagaagaaagagaaaggaaaaaactgagtatcaggaagaaaagagggagtagatgaggaaagaaagatcaaggaagtaaaaggtaagaaagaggaaaggtttacgagagaaggaagtagaaagaagagagtgtaaggcggcgtcataatagaaatccgaaaggagtagaagaaaagagagagaagaaagaaaagaagagaaaagccgtactgaagaccgacacaggtactcgaggagaaaggagacccaaattaaggtgagagaatggacgataaggaactaggcaaaaggatatggtatctgcggtagaacatatgaaagaagcagcaccgactgtttagcanaaacacagcactctgcagaaaagagaaaatgt

SEQ ID NO: 2380 - DNA, 249 bp, Cyanidium caldarium
  Clone ID: LIB190-047-Q1-E1-E2
acccacgcgtaagctagttctttggtttccaaaattggccatttattattgtctcaacatgttttgtagtacaaagccaactggatatcaatcacggtcaccgtgaaagaatccataagacactgtatacttgtcgtccgttattaactacgaggtgaatcagtcttcatcaagttgttcttccaatcgttgaatcttctccctaagcggactacatacgtaataataactagaagagtcaaataaata

SEQ ID NO: 2381 - DNA, 407 bp, Cyanidium caldarium
  unsure at all n locations
  Clone ID: LIB190-047-Q1-E1-E5
agcggacgcgtggggtgatttccaccaagtcacaaagaatcgtaaaagagaaaatgacgataggttttgtacatccacttggaactagtgttcaatgtaacaaacactacaaaactgctacttgttcttcccagttttattccaagtcttcatcgtttctanggagaaaccatgggggttgcaagtcgtggtctcttgcctatggaagcaaggtggatcggaacaagtacacttacagtcatcctagttccgtaaaacaaggaagaggaccaactatggttgcttcgaaaacagagttggaacaacaagtaagatccagactagtcaagttgtttgagcagacaccttgcatgcccatcatggtgagacttgcttggcacgacgctggaacatatgatgcacagacg

SEQ ID NO: 2382 - DNA, 165 bp, Cyanidium caldarium
  unsure at all n locations
  Clone ID: LIB190-047-Q1-E1-E8
gacccacagcgtacggacagtgcatccggcaacgccgtccgcgtgacgcatctagatcacgacatcancacatgcaaatacggtaacagcgaacggtgtgcctaatagaggtgtcaaaggagtgagaacagcatcaacagcacagcatcaatgtaacgaaatggt

SEQ ID NO: 2383 - DNA, 410 bp, Cyanidium caldarium
  Clone ID: LIB190-047-Q1-E1-F2
ccacgcgtaaggaaagcttgggtccagattcgattgagtttatagtgaaccattccgacatgcgtcttctttgcatcagttcagaaaacctggataaagttcttgggaataaagacaagtttcccaaacttgaaaagatagttttgatggaccgagaaaacctgaatagtgatactctcccagactatgttttggatatacagaaacttatatctgatggaaacgaatctgggcaagttcagccaggatcattggacgatattttcgtgatcatgtataccagtggcactacggggaaaccgaaaagagttatgttaccaaacaaagcatttctttgtgaagttgccggtatattaaaggttactgatcattatcacatttctttagacaatactgatgtaacaatgagc

SEQ ID NO: 2384 - DNA, 427 bp, Cyanidium caldarium
  unsure at all n locations
  Clone ID: LIB190-047-Q1-E1-F3
gacccacgcgtcagcaaaaggagtctactccttcacttggtccttacgtctgaggggtggaatgcagatattcgtaaagactcttactgggaagaccattactcttgaagtggagccctcagatactattgagaatgtcaagtccaagatacaagacaaggaaggtattcccccagaccagcaacgtttgatttttgcaggtaaacagttggaagatggtcgtactctctcagactacaacattcaaaaggagtctactcttcacttggtcttacgtctgangggtggaatgcagatattcgtaaagactcttactgggaagaccatcactcttgaagtggagccctcagatactattgaaaatgtcaagtcgaagatacaagacaaggaaggtatntcccccagacagcaacgtttgatttttgca

SEQ ID NO: 2385 - DNA, 407 bp, Cyanidium caldarium
  unsure at all n locations
  Clone ID: LIB190-047-Q1-E1-F4
acgcgtcagcggacgcgtgggcggacgcgtgggtgcggatttgggaagagtatggtgcagttacaactatcttctcgtcatcagactcaagtacgatatgtggtggaaagttatctgagagagaatccaaaacagaaacatttactcgatagtcttaaagaagatacaatatcccaccaaaatttgtacgagataactcgtttggcgcccaaagatgctcttccaccgttttggtcncttgtggcaagtagcacgtggaaactgccacctcccaagtgtccatatgacaattatcaacgtcctgcaatactagacaaaagactagaagctcttcgtgagcgtcatgaaagaaagcagtatagggaactaatacaggacttacctagtcttgcgccaagcgaaacatc

SEQ ID NO: 2386 - DNA, 416 bp, Cyanidium caldarium
  Clone ID: LIB190-047-Q1-E1-F5
gacccacgacgtcaggttgtggagtaagtgcgcttggcagcaaactaaaagatggcaagaagaatcatcggagcttatatgtctgacgctactgtagcgtctctatttagcgtgaaaatgttgttctaccttacaatacttgcgttctctatcactattgtgggtcttatgggtaagagttccgacggtatttgggttcacagtgttccagcgaaagacgaatattgtgcatacaagtcttcccttcaagtaaaccaccacggcatagcttcctattgcaagtatatcatggctgtagcagctattggtttggttatcagcttcttcgagttttggtatgcattcctcggaattttcttcaagtggcaacaaaagttgtggtatattgaatctgctatcaacgtgtttttctgggc

SEQ ID NO: 2387 - DNA, 413 bp, Cyanidium caldarium
  Clone ID: LIB190-047-Q1-E1-G1
agcgatgattcgatgcggcacaagacagttgtggtggcaactgcgcgctcgttatcatacaactactactgtccatagagtagcagcagacgaagaaaaggaatctgtcggtataaagcctaaacgtttgcatcagcctcttggagtttatccacaaggaaccaatctggaagaagtgagagaaaagtggcaaagtgacgctatggaacttatctcgaaagtacctccgatagtagtcgatggctatgtcatagcgtgtaatggaggccgcggtccattaggacatccaatagaatatattcgtttggaagcaccttatccttcaacttgcaaatattgtggtttgcgatatatcaacaaagacacttttgaaaagtggaaaaaagaaaataacgaataataaaatggaaaga

SEQ ID NO: 2388 - DNA, 228 bp, Cyanidium caldarium
  Clone ID: LIB190-047-Q1-E1-G10
aggcccattttacatccgacaatttcagagaaccctgctatgaaaacacaactggcatacagagacgccatgttcaacagcttacggatggcgaccacaatgcaggatgttcacgggaccagaataacaaggacgccactagcagtttcttggccattcacggtggcccacccgttttgaccagacttcgcaagagaatatcggataatcatcacacttcgcgcttcc

SEQ ID NO: 2389 - DNA, 94 bp, Cyanidium caldarium
  Clone ID: LIB190-047-Q1-E1-G11
aaagacaatgaaaagaaggataaggaaaaataagggaaggtggaattggataggaaaggattattcccacttcttaggaaggacgttactggat

SEQ ID NO: 2390 - DNA, 398 bp, Cyanidium caldarium
  unsure at all n locations
  Clone ID: LIB190-047-Q1-E1-G2
gacccacgcgtacgggaatggcggctttcgaggtcgagcttcccctggcggacgtttttttcgtgaagcaaacaacaacaacaacaacaactatcggtcgcgcaatgcttacagtgaaaccccatcacaacttgttgaaatgggtatttttcaacatccctgcgagaacgaactagtttgtaagagtaccaacgaaaagatcccgttttttaacgctccaatatttctggaaaacaagacgcagattggcaaagtggaggaaatatttggtcctattacagacgttcactttactgtaaaaccagtggaaggtgtattagctacttcttttggtgtangagacaaattctacatcggctcagagaaactgctgccgcttgaaagatttcttcccaagc

SEQ ID NO: 2391 - DNA, 408 bp, Cyanidium caldarium
  unsure at all n locations
  Clone ID: LIB190-047-Q1-E1-G3
agcaaaaggacataagatttaaacggcagcatggaggaagaaactggtacggaacaacctgaaacacaaacagcaggggaaactgcacaagaacaaacagacagtccggcagtagaaacagagaccttttcgaatcaatatctagagcagcttatcttgtcgtacttgaaacaccaatgtttttcaaaaactgccgagtcttttgcgagagagattgctgttgaagatacagtggaagaaggttcagcggaaaccagtgaaaaggagacttccattgagtgccttccaaagcaaatacaagtgctggacaaacatgaactggaactgttagatttgacgaagacggtatggcaactcataaagaaaggagagtgtttgccaggtttggactgggcanacgtggtactg

SEQ ID NO: 2392 - DNA, 345 bp, Cyanidium caldarium
  Clone ID: LIB190-047-Q1-E1-G4
ccacgcgtcaggagaacgacagtagcgatgggattgtttagtagactgtttgtgaaaccgagtcgtgtaccgcaaagagtcgtagagtttcaaaagcgcaaggcggaaggctactttacatacaacgccgggaagtacgaccgatacatcaacacacctatttacctgtttgtgtccttcaccggtctttatgcctttattgacggttgtctttgggcggcaggaaagaaggaaagtcaatcgtgaatagcgttttttgtccttgtggacagtcttatgaactagtgattcgtttgttctgccagttttagtttcttgtaatgaaagtttcctttttttccttgc

SEQ ID NO: 2393 - DNA, 376 bp, Cyanidium caldarium
  Clone ID: LIB190-047-Q1-E1-G7
agcggacgcgtgggccacgggaccggttattgttgcagctggaggttgcgatgtatttgtttcacgagttggcacacgaagtactattactggtacagggacatatttataggagaacagtccatcggtccatattgtggcagtacaaccgaccgaatctcctgttttatcgggaggcaaatctggacctcacaagattcaacgaatatgtgcaggatttatacccgatatattggataccagcatatacagtgaactactccaagttagttcagccgatactatcgcgatggcacgaaggatggcaaccgatgaaggtttattggtacgaatatcttctggagctgcagtttatgcttccattgctattggaaag

SEQ ID NO: 2394 - DNA, 421 bp, Cyanidium caldarium
  Clone ID: LIB190-047-Q1-E1-H10
cacgcgtcagctcaacgacgtaatgagactcactcattttctcgttgttttgtcttttgtagctgttttcctcgtagctcatgcagttcccgttggagaagatgcattcagtttcagtcagacttttggaaatgcttctgcttcaggcaacgcctctgttattccagctacaaccaagatccccaagttagaagtaactagtagtgcctcatcaaaggacaatggaaaagcagctcaagtagactttgcagattactcaaagggatatccttcgcctagctatttttacgctccttcttacacatcctatgtggaatttcctcaatatccatcctatccatcatggccttcttttaatgagcagcctgcctttggtggcttcgattccaatgcagagtttggaaagtctgaaattttcgtg

SEQ ID NO: 2395 - DNA, 389 bp, Cyanidium caldarium
  Clone ID: LIB190-047-Q1-E1-H12
ccaagcgtccggtggtggtgatgccctggattgagctacgtagtggcaactccgctgtcttgaaagacataactgcaagtattgaaaagcctgacataaaatggataactaggacgaatctcagtacttgtctgaattctgcagaaggaaatgttacggttgacttgtcgcggcagtgtagcttgaaggatatattttcattgaagcttctcgacaataactttaagttggcgtgttttaatgatgccttgtttttagttttaccaggcttatcctttgttattactggtaatcgtatattctgtagacgctcggacttgaatgaaacggaagcattggagtcctgcttttcgtttatgaagatatgccccacgtacaagtcgttggag

SEQ ID NO: 2396 - DNA, 411 bp, Cyanidium caldarium
  unsure at all n locations
  Clone ID: LIB190-047-Q1-E1-H2
gcccgggccacgcgtaaggctacgcatgtcgtcgaacggtccgtaccgcttaagaagagctcaaagggaagatgtcgaaaacattttatttctgataaagcagttggcagaatatgaaaaagaaccagaatctgttcaaataaatgagaaagatcttgaaagagatggtttcgatacgcagcctcctctattttacgtcgttattgccgaagtttcgtttaggaacagaatgtttggaaatgtgtagggtttgcgttatggttttatgtgtattcgactggagagcgcttcatttggaagatcttttcgtgctaccacaatatcgcggtcaaggaatangcaaagctttgttaagatattgtgctgaggttgcccttgctgaaaagtgtaagagatatcaatggaacgtct

SEQ ID NO: 2397 - DNA, 390 bp, Cyanidium caldarium
  Clone ID: LIB190-047-Q1-E1-H3
agcaaatgcaacaacaggagacaaagtcaatgaaatttcattaccacatgatacaatggatgtctacggcatacgaggactcttaaagttaatgtcgccaagctggagaacggaacaacccgattatttgctacttacacttggaatagacttgacaagcctaggacttaacttgaattctacggagcccttgtatttatcctttgaaactccgtttcttgatatgaaccgaggtctctatcatgaaccagaatatagtcttccggaatgttacaaaatggaacaaaagccgccattattgaaattgggtcattttaggaagtttcaattgcaaacattattttatatattttattgtatgcctcgagatgcattacagatacttgcagc

SEQ ID NO: 2398 - DNA, 409 bp, Cyanidium caldarium
  unsure at all n locations
  Clone ID: LIB190-047-Q1-E1-H4
cgtaaggggacagngtgtgtttgtgtgattggttggtataaaggcgcctattttcaaagagtccaacctagtgagaaaacatgaatccggaatatgactaccttttcaagttgttgctgataggcgactctggagtgggaaagtcttgcctcttgttgcgttttgccgacgacacttacaacgagagttatatatcgacgattggagtagactttaaaattcgcacgatagaactggatggaaagaccgtcaagcttcaaatatgggataccgctggacaagaacgtttccgcactatcacttcttcatactatcgaggtgcacacggcatcattattgtgtatgacgttaccgaccaagaatcgttcaacaatgtcaagaactggttgcacgaaattgatagatatgc

SEQ ID NO: 2399 - DNA, 375 bp, Cyanidium caldarium
  Clone ID: LIB190-047-Q1-E1-H5
agcgtttattggaagacttgcctcctccaaaactggcacttaatggcgctggcggtccaacagcaactgaacttgcacgtttgcttggaaagggtggcactatggtaacttatggaaatgcttccgggaaaccatttagtattcctactagtctatttacaacacaagatatttcactgaaaggattctcgatgcttaattggttaaagtccaagtcagagcaagatgtgaagaaaatgttgcaaagtgtcacacaaatgatggaaaaggaccagttgaagttttggatcgaaaggaaaaagttggaacaactcgaaacaacattagaagcgttaaccacaaaagaacctcaacaggaaagaagaatagttttag

SEQ ID NO: 2400 - DNA, 357 bp, Cyanidium caldarium
  Clone ID: LIB190-047-Q1-E1-H7
gacccacacgtaagggaggagaatggtgaccacccacagctgcggcattttgccaagtttcgtttcaagtggtttccaagtacagcttgccaaacagttatcttctgttattcattcatgaaatacatgtctatggagaaaatgttattcgcaaaaggtcgctcgtgttcgttccataccaacatctatagttgcaagttacaactacagcatatttcacgacgaccataatcgttcgacagtaaaagtagattcacgagaatcagcctacaacttaaataagccgttgggtttggtattggaagaatcagaagatggaacggtagctgtagctgatacagattctccagggaatgc

SEQ ID NO: 2401 - DNA, 179 bp, Cyanidium caldarium
  Clone ID: LIB190-047-Q1-E1-H8
cgacccaagcgtacgggagcaagcttggaagtcgccgcagtatatcagagattgtcacatgtcaagtccgtaaagcaagtgggtgcgtgaagctgtgtggaagagtgccacattgtgactgcgaagaagtctgtacgagatagttcgactgtggggcatattggagcttgtagcgggaa

SEQ ID NO: 2402 - DNA, 290 bp, Cyanidium caldarium
  Clone ID: LIB190-048-Q1-E1-A1
cccacgcgtccgcccacgcgtccgcccacgcgtccgcggacgcgtgggcttggaactaaggaaaagatggatgcaacagaacaatatatcagaagaaaggaacgatagtgctgaggacgtcagctcaaactcatttgcctgtgttgcgagtgcagtttcctcgaaattcatccaaactatggctgagaaggaagggtttcaatttcgtgaaacattaacaggttttaaatggttgagtcatgccgctttaaaactggagcaacaaaattgtcaacttttattagcatacg

SEQ ID NO: 2403 - DNA, 332 bp, Cyanidium caldarium
  Clone ID: LIB190-048-Q1-E1-A11
cgcgtgggcggacgcgtggggcgatatgcactcgctcggaacggttatttgttttgtgtgttgttagatactttgatgtagaatagttgacaagaaagaagaaataggatgaacaagagatatacgaatatagggacaactgatgctcaaggcaccagtgatgtgtatgtttatctgaatttgccacttttacttccatttcttgtagatatatatatatgtgtgtgtgtgtctgtactaattttggactaaggacatggtttctagggtttattgcaaaaaagttgaatagtaactcgttctatatggttcgttgagtaatgtctagagac

SEQ ID NO: 2404 - DNA, 431 bp, Cyanidium caldarium
  Clone ID: LIB190-048-Q1-E1-A12
tgaaaaacgaacgagtcctttcggtagtaactttgaagaatctgaagctgcgtaattgcgcgaacggtcacgtcacttgtatgaaaagtactagctcaaggttacaactcgagcaaaacaatactgcaattcacttgttcgatccattgcttgcaagcaacttaacgagtcaaacagcgactcgaagagacaccaacgttactattcttgcaagattaggtatcgcctagtgcaacaagatacgtatatattggtatatttgcaattttatttcgcttcaaaagatgctatatttacttacaagaacaaagtcacttcactgagtgtctttgatgcaaccgtcgttgcctttatgacaggcagagttctaagtatccaatgatacattctaaacaactattgttgtatgtaacaaaaaagagtttacgctc

SEQ ID NO: 2405 - DNA, 380 bp, Cyanidium caldarium
  Clone ID: LIB190-048-Q1-E1-A3
gtccgtgtcatctcatgacttgccttgtcctctgttggagattatccgcaaagtggtgcatgaaagggatggaacgaagatgatagaaatgttggcttcgtttccttccagtcattggggaagtcttcgaatgaatgcttccgttgtttcctggtcactttccgacaaagttcccaagtccttttcggatggaactcgattccttcgccatattggaagtttgaatgaaaccacatttcgtattgtattgaatacgacgatggacgaatcttttgccgtagatatgacttctacttattttgggccttcctatgaaacgctagaaatcattcgacgtcttcctgattggacagatgcagttacttttcagactagtggag

SEQ ID NO: 2406 - DNA, 424 bp, Cyanidium caldarium
  Clone ID: LIB190-048-Q1-E1-A7
aaccttcacctggtgcttggcaagacgcgagtagttccaattctgataaagaaggtctccatattggcccaaactgtcaacttgtagtttgttctgttgataacttgaaagacttcttgggtcagcaagtttatgaacaactccagaaagtatactcggataatgaaagcgttttgatgaagttggatcctctcgcgaagttgttgggaagaaatcttgaacgattatggaggagcgatgttcctatggtgcccgaaccttcccagatggatattgtttccaccagaactgatacagacgagatgcaagtaacagagcgtaaaggagttgtctcagtgcgacaaggccagtttgattggatggagttcttgaaaacatattgtgatttgacagagtctgaagcaagagaatctagttatcgact

SEQ ID NO: 2407 - DNA, 325 bp, Cyanidium caldarium
  unsure at all n locations
  Clone ID: LIB190-048-Q1-E1-A9
aaggacgcgtggggtactcctcgaaagctatataagtagcgtatgcaggaaagaagaaggtaaaggaagagaaggaagaagcagagagggactatgagcgagaaggtggatagtcgagagggaaaaagcccagaagccaagataaggtatcaaagtaaagaaagaaggaaaaggagaagaagagagggtaagcttataagcagcaaaccagagaggaaagcgttaaagcatgaaagaaaagaaatccgaaaaagaagagaaaaaggtaagaaagaagaccgaatcaaggtaagangtanaggatcaagaagagaagagagaatgc

SEQ ID NO: 2408 - DNA, 186 bp, Cyanidium caldarium
  Clone ID: LIB190-048-Q1-E1-B1
acgcgtccaaaatgtagtcactcgtggctcattaacaaccactttccggtagactatcgagaacatgcgcctatctaaccttctgacttgtccctctgtcttgcgaagaatcctgaccagccttttattttacgtctttcatattttcatccgttattgtacattatctgcattttggatttggat

SEQ ID NO: 2409 - DNA, 261 bp, Cyanidium caldarium
  Clone ID: LIB190-048-Q1-E1-B10
gcgtccacatttgagtgttttgggtactgggctgaatatccttctcctgcactatgtctgcgaatattcgaataaagtaaccaagtatgcaatggttttggaatttccggggcggccttgcaaccttcggaatccgtggaaccggttggccaccgggaattctgttcaaaccgttcacaaggatttaagaacacctacgttgggaaaggatgcactttaaaatcccgtgggtacagagacctgtcctaattgatataagaa

SEQ ID NO: 2410 - DNA, 119 bp, Cyanidium caldarium
  Clone ID: LIB190-048-Q1-E1-B3
ccgttccgctctgtttccagtctctcagttcttatgtcaccgggactgctctctgtcaccccttatcgcagaatacggattacctcagtttgcaaaacagtccgttttcccgggtctta

SEQ ID NO: 2411 - DNA, 410 bp, Cyanidium caldarium
  Clone ID: LIB190-048-Q1-E1-B7
attggaatttggtttccttttggacatttagaacgcgcctttcgtaccgattggccgatacaaggtcatccctatacttatggatatcctagtttgagatatgcaagtcaatgttccagtggaacttttcgtcaacagtttgcaaggcataagttgggagggctacatatatccaattattgcttccctccctttgttatcttaaaggaactaacaggaacggaatatggaaacgaaactcttcaaaatatgacaaaggaacagtgtcaacaacttgtccacgactgccaaggccactcttttggaagaactgttcctttagaccaagtcccagaagaagacttggatgcagtgtatattccttggtttgtcaagtgtaaccctaaaagatatccatcgttgatgcatca

SEQ ID NO: 2412 - DNA, 350 bp, Cyanidium caldarium
  Clone ID: LIB190-048-Q1-E1-B9
ttggagcatttctgcaacatccctcgagagagaaatgtataaggacggcctctacgctaacagtcatagacagagctcttactaaggcaaattgagaattccaaactggatagagctccatgttttggaatagagcacagcccttactctcctcattgggtacacaatagaatctttccttattcagatagaaattttgctaagtgcacgatacaacaagtgaagttcgcgaatttccggctctaattccatctctacattttctgtacagggtggataactagaagctgtcctcattcgccatgaagtgtccactatgtcacgtaactatctatttgagtgattcggat

SEQ ID NO: 2413 - DNA, 169 bp, Cyanidium caldarium
  Clone ID: LIB190-048-Q1-E1-C1
gacgacgcgtccgaccacgcatccgcgattgcctgccttctctcgacactcgttggtttgtcctttgaaaacacgttttagagtcattccaatggctgcagtaacctttaagagacagaagactgacgtacctggtattctacattgagaaaatgctctcaacagcttt

SEQ ID NO: 2414 - DNA, 179 bp, Cyanidium caldarium
  Clone ID: LIB190-048-Q1-E1-C11
ggacaagagcgaagtgagtccagctttgaatgtgctttatgaacactatgaacacgctgtgcctgattctggccgatcagcaaatccgcctgacgggtttctccagttcaagtcagagctgttggatagtactggtgatatgctacttgggtaagctgttgtttatgtctattttcatg

SEQ ID NO: 2415 - DNA, 342 bp, Cyanidium caldarium
  Clone ID: LIB190-048-Q1-E1-C12
actgaggagacataagatggaataaaaaaccaactatttgcacaaaaaaaaaaaaaaaaaaaaaaaaaaaataaaaaaaaaaattgaaaagaaacaacaaaattaaaaaaaagggaggacgcaccaaaagtttccaagcttacttaaacgtgctggccaacttaatgctcttcgaaaatgtgaccctaaatttcattcattggccttttcttttaactccccgggtttgggataactcgggctttatctaatttacccggcttggaacacatctgcctttccccaactgtctttttttttaacaagtccccattttttcctcttcccaagaatttttcagcc

SEQ ID NO: 2416 - DNA, 416 bp, Cyanidium caldarium
  unsure at all n locations
  Clone ID: LIB190-048-Q1-E1-C3
taattggaacaaggtttgaacgccttaaaaaacaaaccttaccaattaacccaccaaaaaagggtaccggaaataagtcccccaagggaaaattaaaaatcctaattaaccaataaaacccaaggtctcaaggaatttcaaaagttttttaaccanactccgaaactcggtaagccgaactttgaagaaaaccaactccctatggagaaaatgttgtctgtccaacgattggccgcttcccaagctatttgagagacatttcgtaattctgccaagaatttcgggttaaaatccttggaaaaaatccattggtcctttaacttccccaatttgaaatccaagtgcgttaatttgccaaattaattgtgtcctctcctcctagaccctgttatttagtagaatagatatagtaatac

SEQ ID NO: 2417 - DNA, 369 bp, Cyanidium caldarium
  Clone ID: LIB190-048-Q1-E1-C5
actcacaagtccagagaaatgttcagatattagaggtgtcaagataccaaacttttctgtgcggtttataaaaaagtagtttcgtgagaaaacgcaagagacacctaatattagtagaagaccttgtaatgtttcggtttccaagcgagtctgaagttaccggcgaaacaacagattctcctagcttacaagtgtcttctcacggaacgccttcgacccttcatagtctcccggaatcttcttatcatgagtattacgtgaagcataagtattcactgtatagaacgggactgggtcgaaaacacttgtcagatcccaattcgactcatcaatcttcacgggttggagcttatatacatgggagccacg

SEQ ID NO: 2418 - DNA, 313 bp, Cyanidium caldarium
  Clone ID: LIB190-048-Q1-E1-C8
ggtcgacccacacgtccacccacgcgtccgcccacgcgtccgcccacgcgtccgattttgtgttgttgtgtagtgatggatagggactggggtgcaaagacaggaggtggaggagttgcctccaaagaacaaacagatatctcaagaagagaaaggttgcgtcaacttgctttggaaacgatagacttgaaaaaggacccctattttatgcgcaatcacttgggaggctatgaatgcaaactgtgtctaactttacacactaacgaacgaaattatttggcacatacgcaaggaagaagacatcagatgaacc

SEQ ID NO: 2419 - DNA, 113 bp, Cyanidium caldarium
  Clone ID: LIB190-048-Q1-E1-C9
gacgacgcgtccgaccacgcatccgcccacgcgtccgccttggcatcgagaagcgatgaagggcgtggctaccatcgatatgcttcgaggagctggaagcgggctttgatccg

SEQ ID NO: 2420 - DNA, 401 bp, Cyanidium caldarium
  unsure at all n locations
  Clone ID: LIB190-048-Q1-E1-D10
tcgggaaacggtaacaaaatggtaataacttcggaaaaggaaaaaacaattggccccaaaattctccccccaaattctttcgtaaggcgcaatcctaagggaaatatgggcggtgttgctgcggagtatcaagtgcctactaagcaagtggtgagcttgggacatcncgaagcactgggattggctgggtttgctgcaaccgactttatgttgagttgtatcaacgcaaagttgttacctagcagtatgacaaatagtattatcgcacttggtttcttttatggaggttctgcgcagcttattgccggtattatgacctttgtaaagcagaatacgtttggtggagttgcattttcaagctacggtgccttttggttaacttttggagttcttataacatt

SEQ ID NO: 2421 - DNA, 313 bp, Cyanidium caldarium
  Clone ID: LIB190-048-Q1-E1-D12
tggcggttcacaaatgtttcgctcaaggagtactccatatatttatcgatggcgtcctgtaactgttactcattcagctgaccacaaagatggccttaaggattctttgagaaccactcaaatctttcgaaattcagaaacttatcgtaacaaggacgacatgctgaaagttgaagttataccccacactggcctaccaggtggaaagcatagacctcgtgcctctccttgttcagctatggagaatgtgatgaacaacaataatgactggacttgtactgctaggaatgcttcattcgagatgcatagtgtc

SEQ ID NO: 2422 - DNA, 138 bp, Cyanidium caldarium
  Clone ID: LIB190-048-Q1-E1-D4
acgcgtccgattccgagttcgcatgcacctagtcgtcgtccttgtgattgcagtattccgaattcttttcagagatactgtgatcgtcatgtatgtgcttgccctatcagctgttacatcacatccaagtatgggatt

SEQ ID NO: 2423 - DNA, 400 bp, Cyanidium caldarium
  Clone ID: LIB190-048-Q1-E1-D8
cccacgcgtccgcccacgcgtccgcgttggtaagcaaacatgggagcctacaagtatatgcaagaattgtggagaaaaaagcaatctgacgttatgcgctttttactccgcgtccgtgcttgggaatatcgacacttgccttcggttcaccgagcttctcgtcccactcgtcccgacaaggcaagaatgcttggctacaaagcaaagcaaggttatgtaatctacagagtgagagtccgtagaggtggtaggaagagaccagttccaaagggtatccaatatggcaaacctaagaatcagggtatcacacaactaaaattcaagagacataagagatcagttgcagaagaccgagctggaagaaggtgcggaaacttgagagtcttaaactcgtattgga

SEQ ID NO: 2424 - DNA, 341 bp, Cyanidium caldarium
  Clone ID: LIB190-048-Q1-E1-E10
cgtccaattcaatatctttaaatgagctacctaaaagggaatcaaaaaaaggcttcctttgtggcctcgcgtggttccagtttgttcctttgggatatttgtttaattttgatcactacaagtgaaaactactcttcgacagagaaactccctactataattcttggtaaaataaaactatttattcctacacttctttataaaaaaaaaatcaaaaaaaaaaaaaaaaaaaaaaaaaaaaaagaagaaaacaaaaaaaaaaaaaaaattaaaaagaacttatctgtaaaatctcaaaccttctaaaatgttacctcaaaagatattcacttgaccaacct

SEQ ID NO: 2425 - DNA, 192 bp, Cyanidium caldarium
  Clone ID: LIB190-048-Q1-E1-E11
gtccaaccacgagtccggcataaacttgggacagagtcttggaacttgggcttcctatagttgcacacgtagtacctgtatgctcacttgctgctttgatcttattccgttcacccttgatgagagttgctctttcgagttttggatgcctattaaggttcttcctcacttacatttacccactcctgcact

SEQ ID NO: 2426 - DNA, 424 bp, Cyanidium caldarium
  Clone ID: LIB190-048-Q1-E1-E12
ccgcccacgcgtccgcccacgcgtccgcccacgcgtccgcccacgcgtccgcttgacaaggacaaacgttctttagcttctacttgtgctcacatcttgtctattttatttgcgtttgacgcaacctacgagttggaacctttggatttggtgattcagcagtgctcctacgtggcagactggttgagtagtaacttggtggacaatgagtcaactccggaagacttccgtcttgccgttttgtcttcgttgtgtcagttcgttcgacatgacagaccaagacttgcttttgcctcgaaagataacataaagaatctgtcttatgtattggaaaataacaagcaagagcctgtttcaattatttataagacaatctttgtgttttggatgttatcttatgcacacagtgctgaggcaaaacagt

SEQ ID NO: 2427 - DNA, 363 bp, Cyanidium caldarium
  Clone ID: LIB190-048-Q1-E1-E2
gtccgactgtgaggtggcatacggagtggtattggcatatgttaacccagacgttccgacgtggttggaattccacgacttgcggaaagctttgggtgaagcacgcattatgttagtctccgttttctactgtcacaggtggagatgtagttgtaaatcgacatcgacttatctgcagctgcaagtgagcagattgctcgtaatggaacaccatggatggtgagattcccgtttatctcgtttctttgtatggaagctgcgctacgatagttcttgttgtggagtctagttgtttggtactacagccttaattttgtgggtgttacaactcatcctaggctatatacgtaaagttagaccgat

SEQ ID NO: 2428 - DNA, 69 bp, Cyanidium caldarium
  Clone ID: LIB190-048-Q1-E1-E3
ctttggttcccgcatgcgttaagtttgagtctgtgaaaaagttgcacggatggaactacagttttaatt

SEQ ID NO: 2429 - DNA, 380 bp, Cyanidium caldarium
  Clone ID: LIB190-048-Q1-E1-E5
atctttacgagaatccttcttatgtctcaccgaatcaagttcgaagatccctgaaacttcaacaagcctacaaacggaggttgaagttgaagcggaaggaagctcagaagactcgagtggaagagaataagcttttatctgatcccgttgaagatatgtttcgttcctaatgttatagctgtagactttgtgtgtccaatacacctaactctatagagctgtaaaaacaaatagcgtttgcaactaaaaatgtaaaaactacaaaataataaaaaaaaaatcaatgaaaagtaaaaaacaaataaaaaataaagtaaaaaaaatggagagtcctaactgtaaggatccaaaggtaaacaaaaaaaaaggggcggccctca

SEQ ID NO: 2430 - DNA, 407 bp, Cyanidium caldarium
  Clone ID: LIB190-048-Q1-E1-E8
acattccgtacgttgtttgctgctctcgtatttcatcaattctttgaaggatttgctgtcggtactactgtttccgaagcccagtttggcacttggaccactatagtaatggtactttgctattctttggaaactccaatcggtatatctattggtattggtattgcacacacttatcaggaaaactcctcggcatctttgttaacgagaggcattttggatgccatctccggtggaattttaatatacacaggattggtggagttgttgacttattggtttacgcgcaactcgaactttttaagacgcaaagccatacctatttttagtattgtgggatttgtctggttaggagccatctgcatggcgattatccgagcctgggcctaagaataaaattgtttgag

SEQ ID NO: 2431 - DNA, 286 bp, Cyanidium caldarium
  Clone ID: LIB190-048-Q1-E1-F3
cgtccgatttcaacaaactggaagctactttgttctatgccaacagttttcatccttgtttattggaacacttgaacaactgtcagacaacaagttgtgtccccagagtatctctagtcaagaccgcgcggaaaaaacacttcgcagcaacaagtaccggttctaaagctaatctgaaagaagaagcagtagagactaacacaagatgggacgctccgcctggcaattgggaagagcacccgagtcgctcaggttccacattttccgagataaagttgccaaagca

SEQ ID NO: 2432 - DNA, 212 bp, Cyanidium caldarium
  Clone ID: LIB190-048-Q1-E1-F4
cgacgcgtccgcggacgagtgggagagtatgagtatgttccatatgccacttctacaccttatccatcggtatctccaagttatactccttcagcatatcaaacaacttctgcttattaaagagccgaagactggatagatttttgaagtgtctcgtgttcaaagaaaacatgagacatgaagcacacagtataggatttggtttttacccg

SEQ ID NO: 2433 - DNA, 432 bp, Cyanidium caldarium
  Clone ID: LIB190-048-Q1-E1-G10
gaccgacgcgtccgagaaaatatcaagtcgaagatacaagacaaggaaggtattcccccagaccagcaacgtttgatttttgcaggtaaacagttggaagatggtcgtactctctcagactacaacattcaaaaggagtctactcttcacttggtcttacgtctgaggggtggaatgcagatattcgtaaagactcttactgggaagaccatcactcttgaagtggagccctcagatactattgaaaatgtcaagtcgaagatacaagacaaggaaggtattcccccagaccagcaacgtttgatttttgcaggtaaacagttggaagatggtcgcactctctcagactacaacattcaataggagtctactcttcacttggtgttgcgtttgagatgtggctgttaatgagtttatcctgaagttgttttt

SEQ ID NO: 2434 - DNA, 451 bp, Cyanidium caldarium
  Clone ID: LIB190-048-Q1-E1-G12
acccgtccgaccacgcatccgatcacgagcagtttcatcacaagaaaatacagattccacgcttatatcgaaagaagtattagaatctcaaatcatggaaatgctagaaagagagaactatgaaggagcatttctcttggctctcggagctagtaatttggacgtcgtagaatggctatgtgagaagttggattgccatgaattgtttcaatctgatgagcctcccttgtcacaagtaacattgctatctcttattcagcagttagggtttgaccttgaaagaaaaacagaaatgaaaatggaatggctgaaagaagccgtcatgttattggagccttcagatgaaatgattcaagactatttttcagatattttgtcaatgttggtgcagaacttggaacatcttctagaagctggtttgaataattctcgactttcagttcatttgcag

SEQ ID NO: 2435 - DNA, 376 bp, Cyanidium caldarium
  Clone ID: LIB190-048-Q1-E1-G7
agtcgtctgtgcgtccgattcactgcggactgtctttcctctttgtctctcgttatgcgatacttgcactcttcagaatatgtcaagataccacaaggagtatcggtggaagttcactctagaaaagtaagagtaaagggtcctcgtggtgttttagtaaaggatctttctcacgtcaatatggaaatgacgaaagaaaagtccggtaagagagttcgtgtgactgtatggcatggctctcgaaaagatttggcttgtctcaacacagtttgcacgcatattaaaaatatgatcaccggggtaaccaagggctatcgatacaaaatgcgcttggtatatgcacactttcctatcaacgttactgtgtctgataatg

SEQ ID NO: 2436 - DNA, 356 bp, Cyanidium caldarium
  Clone ID: LIB190-048-Q1-E1-G9
gcgtccggttgacagagtgtgttgataagtgtgagtatattaagtgagtataggaaggagaagggaagtcaggagcagttgttgataatggaagggatactgttagagttgtttagtgtaagagacataatacgattttatataagttataagggagtggagtgagataaggatggacgaggagatggtaatgataatagcatgtatggtagtccattggagcaatttgaagtggtatcgctgtataagatggagatagaaggaagggaaatagggataagtaacataggagtgtatataataatgatgagtatagtatgggtaaagaacatgaggaagaaagaggcatatacggg

SEQ ID NO: 2437 - DNA, 449 bp, Cyanidium caldarium
  Clone ID: LIB190-048-Q1-E1-H10
acccgtccaagtcgtatgacgttggtgcctcattaagccatcgttgaactacatcttttatctcttgtagcacaaacacaaattaaagaacaatgcgtgaggttatttctctacatattggtcaagcaggtgttcaagtagcaaactcttgctgggaactctattgtttagagcatggtgtcaacgctgatggaaccattgataaaaagggaaacacagcatacgaagaagcttttggtaccttctttacccagacaagctcgggacgatatgttcctcgttgtgtatttgtcgacttggaaccttctgtcgtagatgaagtccgtacaggtgcctaccgccatctctatcatccagaacaacttatttccggcaaataagatgctgcaaacaagtatgcaagacgacattatactattggaaatgaaatagtcgaccttactttggag

SEQ ID NO: 2438 - DNA, 426 bp, Cyanidium caldarium
  Clone ID: LIB190-048-Q1-E1-H12
ggaagacacgccagttacaatcctctcaatctatcggtgacggatgatttcacctttccatataaacaagtgagctatatactgcaagatcacggcagcaatggagaagatgaagaagaatcgcagcttttttcgtctttcggggtagcagagcctcctttattttccatgtcgttgccagtagtcacaactgctactagtgcgttggaaagcgcggtgatgcaagaaatacttcgacaagaaagttttcatctgcgtgcaagtgacccaacgataagcgatgaattatttcaatccatagttactcgagaaaagagatggagtaggcgtctatggagaaactttcgacgacaagtttatgagagacgttgtcgaatagaagaagcagtcgttccgttggttgctcatagtgctgcgatgcatctt

SEQ ID NO: 2439 - DNA, 335 bp, Cyanidium caldarium
  Clone ID: LIB190-048-Q1-E1-H2
acgcgtccgcccacgagtccgctagtcgacgagaaacagattcacttatgtattttgccattttggtgattgttggtacttatggataaccaaaaacaacacaaccattactcttgttgttgctgcaatgctcaccacaaccaaccaacgacagcgagtcgttgcaacggatgttacgtgacgaatattcttgtgaagagtgtgttggaacatttggacgagctgaatcgttgtctgttgcgagttcaagagttgttgttgttggacaaggaacacgagtgaatgaatggtgcggcaagttaggagaatgccacaatacggagacgtggatatat

SEQ ID NO: 2440 - DNA, 281 bp, Cyanidium caldarium
  Clone ID: LIB190-048-Q1-E1-H4
catcagacgtcgaatgggtttctggacccgcttacttagggaaacgaaaagagagcataatttcagcaacacacgggttaacttaacgttaccttttgcgctatcagaccgtagtatatatgccaaggctttggagtctttttattatgtctattccaccgttgaagaagagtttgaccgtcaaagaagaaattttcccaaaataggggcgctttactttgaagagctgcgaaggaaaaaggtatctctagaacaaaacgtgctttttcaatactaaaact

SEQ ID NO: 2441 - DNA, 367 bp, Cyanidium caldarium
  unsure at all n locations
  Clone ID: LIB190-048-Q1-E1-H5
cccacgcgtccgatcaaagctagtgatagctggtactcctcgaaagctatataagtagcgtatgcaggaaagaagaaggtaaaggaagagaaggaagaagcagagagggactatgagcgagaaggtggatagtcgagagggaaaaagcccagaagccaagataaggtatcaaagtaaagaaagaaggaaaaggagaagaagagagggtaggcttagaagcagcaaaccagagaggaaagcgttaaagcatgaaagaaaagaaatccgaaaaagaagagaaaaaggtaagaaagaggaccgaatcagggtaagaggtanaggagcaagaagagaagagagaatgctgggtggagtagcgaaacaagag

SEQ ID NO: 2442 - DNA, 316 bp, Cyanidium caldarium
  Clone ID: LIB190-048-Q1-E1-H8
aacctcaagtggatcatcccacgttggtaaagatagacttgtctcaaggcagctttaaagtactccaagactgtgacagagatttagaatgtgatcataataccaagtttcagttggaacttattcagtatggtctcttttcacctggtttttggacgagagaaaatgttctgctcttctatttggagctcgtgtcaggtgtattcataaaggacactctctaccttttccaaaacaaaaggtaaagaacatttgtttgcgagtttaatgctgttgttggagacacaagtttcaatggatgccaacattaaaacaa

SEQ ID NO: 2443 - DNA, 341 bp, Cyanidium caldarium
  Clone ID: LIB190-049-Q1-E1-A1
cggacgcgtgggttctggttggatttgttgtgtctgcgtctgttgttgcgagtcgagttcataaatggcaaacgagaaccagggagaggtagagacatatgagttccaggcggaaattaaccagcttatgagccttatcatcaatactttttacagcaataaggaaatctttttgagagagttgatatctaatgcctcagacgcactcgataagattcggtatcagtctttgactgacaagtcagttctggaggcggaaaacttggagattgaaatttacgcagataaacagaataagactctaactgtgcgcgatacaggagttggtatgactaaggcag

SEQ ID NO: 2444 - DNA, 374 bp, Cyanidium caldarium
  Clone ID: LIB190-049-Q1-E1-A10
aaaaaaagagaaaggaaaaaactgagtatcaggaagaaaagagggagtatatgaggaaggaaagatcaaggaagtgagagtgagagaaggagtaatgtgaatgatcgcaggaaagtaattgaagaatagagtggaaagcgcgtaccatttgcataatgtcccagcgagtgaaaaaggaagcaaaagtctcgaggaagaagtagccatgtaacgatcgaagctaggtgatcggatgctgtccatccgaactaaggcttagccaatctctgtggacaaagatgtggcagagatggcaaaatgggtgacaggctactcagagctagtgatatctggtactcctcgaacgctgtataagtagcgtatgcaggaaagaa

SEQ ID NO: 2445 - DNA, 404 bp, Cyanidium caldarium
  Clone ID: LIB190-049-Q1-E1-A12
atgatttgattcctgctgttgctttgaagaatactaaaatgaatgttgccttaatgaaacgtttcggcagcagacaccctgaggaaagtgaggctgtttcgagtgcaactgttgcacaaggagacggagttccaaaggtattgtcgaatgacaaaaagcaactgccgcaagacgactcgatagaacatctcatctcaagtgagattgaagaatatcagaaagtgccatgttaataaatttggatcttgttcaagtcgtaaaaaaataaaaaataaataaaacaaaaaaaaaaaagaaaaacaaaacaaaaaaaaaaaaacaacaaaagcgatccatcaaaaatgatcaaagctaaaataacctatccagaaaaccacataaataaaagggggggccccccaaaa

SEQ ID NO: 2446 - DNA, 354 bp, Cyanidium caldarium
  Clone ID: LIB190-049-Q1-E1-A3
catccagaacgctctaacctttaaatacattgagcatgggcaatggttgcaactaatgcgctgagttgcatctctcactctttccttatcgctgcagcagttgcagccgacgtattttcaagaggatagatggggatatgctcaacagacacaacaccagcatcagtgccaacaagtatgtttacagtatgcatactatcacagtccagtctgcactttcgtaaccacacaaagcccatactggacccaatgctcgaagactgtgcaaaactttgtcccaagccagtgcagtacgtatacccaatctcctacatggacctattgcagcacctacaccaccactagcgtaccatc

SEQ ID NO: 2447 - DNA, 288 bp, Cyanidium caldarium
  Clone ID: LIB190-049-Q1-E1-A5
gctcataccttaaattctttgaggattggcagtggttgcgacttatgggctgacgcgcaactctaactttttaagacgcaaagccatatctatttttagtattgtgggatttgtctggttaggagccatctgcatggcgattatcggagcgtgggcctaagaataaaatttgtttgagacgtcgtggtgcagatgactcgcatgtttggtagttggttcaagtttgacaagagaaaacatttgttgctacttcttacaaataaaaaagttcaaggacaaattgtagat

SEQ ID NO: 2448 - DNA, 335 bp, Cyanidium caldarium
  Clone ID: LIB190-049-Q1-E1-A8
aaaacagagtgacaagaagagatggcaaggagaatattgggtgcttatatgggagatgccacagtggcaactctgttcagtatcaaaatgttgttctatcttactatcatgggtttctccataactatcttggctctcatgggaaagaactcggatggtatttggatacatagtgtgccacctgcagatcaatattgtgcatacaagtcttcattggaggtgaaccaccatggaattgcttcctattgcaagtatatcgttgccgtagctgctattgggttggttatctcgtttttccagttttgctacggtctgttgggtatctttttcaagtg

SEQ ID NO: 2449 - DNA, 415 bp, Cyanidium caldarium
  Clone ID: LIB190-049-Q1-E1-A9
aaatataatgaaaagatttattctttatttgcagaattatttgaaagttttcctttgggacatttgttgatgggagaaaaggagaaccaacgagtattggtaattcatggtggattatttagtcgtgatggggtaacactagaagatttacaaaagatagatagacatcgagaacctgaccaaggtctcatggcagaattgttgtggagcgatccacaaaaggaattaggattaggagtttcaaaacgaggaattggagtatcttttggaccagatgtgactcgacgatttttagatgccaatcggattgccttgttagtaagaagtcacgaaatgaatgaacaaggatatgaaatagaagcagataatacattgattactgtattttctgctcccaactattgcgaccaaatgg

SEQ ID NO: 2450 - DNA, 338 bp, Cyanidium caldarium
  Clone ID: LIB190-049-Q1-E1-B1
ttttgactgaaacatgacggaaagcgacaagtcagtgcctgttgtcttctcaggtccatctggagctgggaaaagtactatcatacaaaagctgaacaaagattaccctgatccaataggatttaccgtaagtcacacaacaagaccaccgcgaccgggggaacaaaacggagtagaataccattttgtttccgaggaaaaatttaaaaaaatgatagagaatagtgaatttatagaatatgcgaatgttcatggaaattattacggaacaagttttcaagcagtaaagagtgttctcaatagaggaaggctgtgtgtgctggacgtaaacgttcaag

SEQ ID NO: 2451 - DNA, 409 bp, Cyanidium caldarium
  Clone ID: LIB190-049-Q1-E1-B12
agaattatcggtttgcatacgatggcttttactcctctggaggaagaggttttcgaggtagaggtggccgtagaggaagaggtagaggcaatggaatatccaagtttggttctcgaggtggttcatccggtggtcgtggtggtagaggtggcggacagaaacgtggcggaatgaacggcggttccaaagtggttattgaaccgcatcgacatgctggagtttttgttgcacgggggaaggaagatgctctctgtaccacgaacttggttcctggtgagtccgtatatggagagaagcgcatctctgtcgaagtagaaaatctcaacgatccttcagttatagagaagatagaatatcgagtatggaatccatttcgattcaagttagcagcagctattttggggggtgt

SEQ ID NO: 2452 - DNA, 381 bp, Cyanidium caldarium
  Clone ID: LIB190-049-Q1-E1-C10
acccacgcgtccgcccacgcgtccgcccacgcgtccgcgactcacaggcctggatggaatttgtcgatcattgtctttgggaatctagggattctcatacagcagacagtttagtcgactttgtgtcatctgtatgtcttccctgagacttgtcagttctttaggaatagaacctcctattctttcatggagtaaatagaaaatgaagtaaaaggagggaatgaaaggaagttatggcacaaacacgtgccatcagcagcggtaaaacgtgtgtagcaagcgtagagcaaatcaactgggtgtacaggtcgagtactagagtaagtgtaaaatggataggatatgacagaaagacgaatcggatgaaatgcacagatctct

SEQ ID NO: 2453 - DNA, 186 bp, Cyanidium caldarium
  Clone ID: LIB190-049-Q1-E1-C12
actgacgcataggttgatgggtgttgtgagtggatcggtaagaattgttagccgtagttgacgctcccagggtgcgaggcactagtgccacttgattgagcacaggcaaagttaaattgcaagcttgatcaagtcaagtatgcatagagtgtgaacaatcagagatagttcagtgttagctactgt

SEQ ID NO: 2454 - DNA, 333 bp, Cyanidium caldarium
  Clone ID: LIB190-049-Q1-E1-C6
acccatgcgtccgcccacgcgtccggatgcaacattaacaaaacgcggatcgactgcaagattcgtctccagataagcttgtaagtagtatgcctagcaaggggaatagttcttagacgttcactaggtgaaagaacaggaagatagtttaagacgaaagtacggtaacttgccggataaaaagcaccttctccagcaactactcaatgcgaaccacatgcactaactaaaattttttgactctgcagacgcaactttggccaaagtaggaaaggaattggcctaagaagttggcttggaatatgcctacccaaactctgaggatgagtgctc

SEQ ID NO: 2455 - DNA, 352 bp, Cyanidium caldarium
  Clone ID: LIB190-049-Q1-E1-C7
acccacacgtccgaacatgacctcgttcaagtaaagaaacagctctttcaatcgcttctgataaaaagaaaaatgcaacaagagatagagctgaaaaaatctaggcggacgcgctgaaggatacgttcttcattaagcgtgcaagccacgtcgccagatcttccaagctgtgcccccggttcatttcagtgggcgtcgttctttgacgtcgtaatgggcactgtccgtacgttactcaacgtaatctctgtgcaattgatgctcatttcgcgagtcggtgtcttaccgaataggtcctctacgtttggtctgccatacagttacccttgtcgaacggctattgggacacccc

SEQ ID NO: 2456 - DNA, 244 bp, Cyanidium caldarium
  Clone ID: LIB190-049-Q1-E1-D11
aattatacgtacgtacccaattgtcggcaaggcttgcaaagttttcccatccttttcatatacttctgttacagtatcacatcgcctgtatttcaagatgaggtcttacatcaagtgactgatgcactcaaattggaactttctacctaatgtgaaggataccgccgattgcaactttactggcaatatccttggttgcaaagaacgattggaataggctggaattactcggtaacatacgatg

SEQ ID NO: 2457 - DNA, 233 bp, Cyanidium caldarium
  Clone ID: LIB190-049-Q1-E1-D3
cgtccaaccactagtcagcgtcatgaccgttctggaatgtaagtgctgtttggtgattgcacatccctctactggactatcgtttgaaaaacatgtcgctgcacctttaggtgcacatgtcaggtgtatccgaagtgaatgcaatttggtaccagattttcgggttaggcatcgttagattcgctgaagccacagcgggagatcatctatacacgccgtgcccttatacggga

SEQ ID NO: 2458 - DNA, 336 bp, Cyanidium caldarium
  Clone ID: LIB190-049-Q1-E1-D7
aggtgattggaacggctctggttgtcacaccaacttttctacaaagccgatgagagaggatggcggttacaagaagtatattttgccagtgatggaaaagttaaaggcaaaacataaggaacacatcattgcatatggaaagggaaatgaaaagagacttactggaaaacatgaaacggcatccatcgatagttttctttatgggacaggaaatcgtggagcttcagttagaattggcaatcaaacagcaaaagatggcaagggatactttgaggatcgtcgtcctgctgcgaatatggatccgtatattgtcaccatgcttcttgtctctacttg

SEQ ID NO: 2459 - DNA, 155 bp, Cyanidium caldarium
  Clone ID: LIB190-049-Q1-E1-E10
acccacgcgtccgcgtatatcagaaagtcagtgcaaggaataaaaaaaaaaaaaaaataaaaaaaaaaaaaaaaaaaaaaaaataaaaaaaaaaaaaaaaaaaaataaaaaaaagaaaaaaaaaataaaagggatgggggtggagctcatgaggt

SEQ ID NO: 2460 - DNA, 319 bp, Cyanidium caldarium
  Clone ID: LIB190-049-Q1-E1-E11
cccacgcgtccgaaaagacagagaagtgagacaataccatcgcagccgtactgaacaccgacacaggtactcgaggagctctgacactggctcatggttagaacagtgacgatgaggaactatgcatatggatatcgtatctgcggtcgaacctatgatacaatcagcatctatggtttagcatacatacagcactctgcacaacagagaaaatgtattctagaaagtgtgcggcctgtcacatagtagagaagacatcgatgatactgacagcgagtatatgatgaggtacacacaatagctgtcctaactgtcatga

SEQ ID NO: 2461 - DNA, 336 bp, Cyanidium caldarium
  Clone ID: LIB190-049-Q1-E1-E5
agtggatttgttgcaagttggttggtttctggactttaaggcatctctcttctcttgttggtgtgactgttgttagatattgtgaaagatgggagtcaaagttggtattaatgggtttgggagaattggaaggctagttcttagagctgctttggagaaacagtctgtagatgtggtagctatcaacgatccctttattgatttggactatatggtctacatgttcaaatatgactctgtgcacggcgcttatccaggtacagtggtagcaaagaatggaaaacttgtcgtggatggacacgaaatggcagtgtttgccttccgttgacctagtga

SEQ ID NO: 2462 - DNA, 246 bp, Cyanidium caldarium
  Clone ID: LIB190-049-Q1-E1-E9
agaacacgtcgagcaacaaataagactggattcttcttgtagagtaaagcgacaataaaactatattggtagtcacgcttgttcaagagggaggcatgaggattctcgtatgggaagattgatgacagaacttcagcagttgctaagatagacttatgaccatgtatatatgatgtgacaatacacatatgagacgtttaggtaactgttgatgcatgtgatgtttgtacattagatgatcaaaag

SEQ ID NO: 2463 - DNA, 355 bp, Cyanidium caldarium
  Clone ID: LIB190-049-Q1-E1-F5
gacccacagcgtccacccacgcgtccgcccacgcgtccgatgaaagggatgaaatgcagagatctctagagaaaggcaagaaagaaaagaaaggaagacacagtaaatgaggcgagaaagcataggaagtgaaacggattaggaacccgtgtagtctatgcagtaaaagaaagaatgagtaagaaaaaagggagtcattccaccaggggagtaaaggcgcaagaaagaaacccaaagcaattgacgggaatcggaaaaaggggtggatcacgtacattaatccgatataaaccgagaaccttacctctccaagaaggtgttgcacggctgtcgaaagaacgtgctgtgaagtgag

SEQ ID NO: 2464 - DNA, 315 bp, Cyanidium caldarium
  Clone ID: LIB190-049-Q1-E1-F9
accatgcgtccggtcttcgttttatgcgagaatttcgttcggatgatgcgatcacgaaatagatgcgttcgactattgatggtcgcaaccactttgtgatatctgcgggtagacgttccgatcctcctatgcggaattcataagacgaacgtgtggaagaatagttgcactttgctaacggaaagtttgtaaatcactcggttcgcattaccacggaacataatgaagttgtgttgcctaagataatctcttggtatagtgatgacgttcctaggactgtgcattccttgttgcgttgggttatactacaattgt

SEQ ID NO: 2465 - DNA, 415 bp, Cyanidium caldarium
  Clone ID: LIB190-049-Q1-E1-G11
aggtgaggtgggaagcaagaagagatgagtagaggaagtagtgccggttatgatcgacatattactattttctctccagagggacgactatatcaagtagaatatgcctttaaggctgtaaagtcagtaggaattaccaccgttgctgtaaaggggctggatgcagtttgtggagtaactcaaaagaaggttccagataagctcattgaccctaaatcagtcaccaatgttttccgaatatcggatcaccacggctgtattttcactggacttgcaacggacgcaagggcacaactacaacgaacacgatcggaagcagcagatttcaagtttaagtttggatacgaaatcccggttgaccagatagcgaaaagattggcggacatcaatcaagtttatacgcaacacgcatata

SEQ ID NO: 2466 - DNA, 362 bp, Cyanidium caldarium
  Clone ID: LIB190-049-Q1-E1-G4
ggccgacgacgcgtccacaacagatttatacgtttcttgtatgaacgggtcacaactatttcgtcctgaaataacagcagactgcatttccgaaatggacaagtgtgtgtcattgagaggaatcggttcaagtcagttactttttggagagcttcttgcggaagaaggagagacatatcgtttcactgtattttattcttgtgaaaaggcaagaagtgaaggaattattcatccaaaacttgtcttaaactttccaccttttcaacctgtaaagcttgaatggaggaaggactgcggtggaatgctggcgtcctctatatccgtaggaactacatggcatggaagtgatattatcaaccaag

SEQ ID NO: 2467 - DNA, 339 bp, Cyanidium caldarium
  Clone ID: LIB190-049-Q1-E1-G5
acaactggctcctgtttacagtccatcgatacaaaaagtcaagtatgtgctttgctctggaatagacatgataaggagatcgtcagcagtcatgggttttcacagaatcagcttatcgtatggaaatatccttcgatggtaaaaattgcagagttaactggacacacttcgagagttttacatttggctgcaagtcctgatggtcaaacagttgtttctggcgctggtgatgagacattaaggttttggagaatattcgaggcagcagaatcgaagctggattcttccagtaagacatggagaagttcgcaaaagagtatgatgaagacatgtaacatc

SEQ ID NO: 2468 - DNA, 358 bp, Cyanidium caldarium
  Clone ID: LIB190-049-Q1-E1-G8
cgggccgacccaagcgtccagaaaaatgtttgtcaacctccatatcattccataccgttatttagatccgtttgcttgtatgcagtggcattagaaaccaactttatcgtggatgaacaagttttggagaactgtatagactatttgtggaatgataatgactgtgttggaaaggaggaaataggagatatttcgaagaatacatatcgtcttcccattgcttggacgattgctcaacggttaggaatatcgctccattcatttcatttcattgttagtgtttatcctgcaaaaatatttggactacattgcaaaggaaaactggaaagaggttatgatgcagatatagtcgtttgga

SEQ ID NO: 2469 - DNA, 405 bp, Cyanidium caldarium
  Clone ID: LIB190-049-Q1-E1-H11
agaatcacacatcatgaccaacagcaacgtcgcctttgtaaccctcttgtctccaaacactcctagaaataagcttttgttagggaaaagacaacattcatgtaaacatccgagtcacaatagttatacaaagtatcaagatgctgctttcaagtgcttcccactgcaagcaaaggaagatggccaaaagggaggtggaaagttcaatccttttgcggcacttggaaatgttgggaactttatggacgccgtgaagaaagcacaggagttttcaaaggaagctggaaagatgcaggaagagttatcaaagacagagctgaaagcttctgtaagtatttgaacaaatacatgtttctttgactttggaaactagtcagaggacggtttggcccacgcatatataac

SEQ ID NO: 2470 - DNA, 358 bp, Cyanidium caldarium
  Clone ID: LIB190-049-Q1-E1-H2
ggccgacgacgcgtccagtgtgcatattctatggcttttgctttgcgtggtctagcgagtctttcaagtcgtttgagtacttggaaacagggttacaagattgtaactgttgcaaataattttgaacgagaaagaggactgcgactggtgagttccttccaaagtgcgcggcagtggacttcgttgcaaggtttgttatgtcgctatagaagtgacagcgttgtggagggagggaaaaagcaaaagggagtcgctactgaaagaagtcctgtttctacagccattcccatgggttatgccgatgaattttccatcacgtgcatcgttggcgtccaggagatccaagtaaacgaacggt

SEQ ID NO: 2471 - DNA, 335 bp, Cyanidium caldarium
  Clone ID: LIB190-049-Q1-E1-H4
ggacaatgaacatcagattgttggtgaattggataagattgctcctaatctgcttgctggtgataagttacaaagtgtcaaagcgcgaatagaggaagtcgtacagaaatatgaggcaacaagacaagaggcaatggaagcaacgcgaaggttccaaaagattcgtgacgagcgaaggaagcgttttctttcatgtttcaatgtagtttcttcgaatattgatagagtttacaaagaacttactcgaaattcagtctcgcagttgggtggcactgcttatttggcactagaaaactacgaagaaccttatttatatggaattaagtatcacgcta

SEQ ID NO: 2472 - DNA, 376 bp, Cyanidium caldarium
  Clone ID: LIB190-049-Q1-E1-H9
actgagtgccagtcagtccttgtcgtcttccttggctccacagttgaacgcagacgttcctgatacttgtaaagagtgtggaagtgacgacttggttgaagaccacgcccaaggagacgtcatatgtagaaactgtggtttggtagctgcggaaagaattgtagacttgggttcggagtggagaaactttgaaaacgatgacagcggtacagaccctagtcgtgttggagggccgagcaaccccctccttgagtcgggtccaagtaccgtgattggaggagtagtatcggactctaaaagtttgaacgcacgtttaaatagggctcagaatagacacagtacttcaaaaagtgaccgagttttgttggatgcgttt

SEQ ID NO: 2473 - DNA, 255 bp, Cyanidium caldarium
  Clone ID: LIB190-050-Q1-E1-A3
tctttgtgcttggacaatggttgcaaagactgctctgagttgcctctttctctctttccttatcgctgccgcagttgcagccgacgtagtttcagaggcgagatggggatatgctcagcaaacccaacaacagcaacagtgccaacaagtatgtcaacagtatgcatactatcagagtccagtctgcacatccgtaaccacacagagcccatactgggaccaatgctcgaagactgtgcaaacctttgtcccaag

SEQ ID NO: 2474 - DNA, 307 bp, Cyanidium caldarium
  Clone ID: LIB190-050-Q1-E1-A7
acgcgtccgggtgtcacctgggtctattgtgtgcattgagtgtaccggttccatgcaattaatgaatcacctcacatgctgtattatctaatctataccggttagaatcctatgctaactagatttatattgacgtgatactagtgcatcagcttagagatatatttgctatggcgcagagcatcagttgctccattgttaatcatatatgtgaacgtattacgagtgaacttcgtagacttgccgcttaatctaggcagattcctttcacttctcgtgtcgtacagactgctgtacgtctgttgct

SEQ ID NO: 2475 - DNA, 414 bp, Cyanidium caldarium
  Clone ID: LIB190-050-Q1-E1-B11
agtagagattggttttcttttcgtccacgcttcgttccgttactttttgtcgtgacaagttataatataaaatggccaaagtaaaccctgtgtcgtcggctcctaaactaagtgtaactagagagatagctatcggtattgggcttggtatagcggtaagttttcacgccagggctttgtagagagagagggagagagagagaggggcgccacagtagccaactgcaaagaagagaggcgtggaatattttgtggaatacatggacctaactttggtttctagtgtgctatggtatttcgccagtggcatctcggatacacggaaatgataagaaaatattatcgcgagttggatgaacaagaacagagttcctcgtcgtcgtgaaaaccgccttgtgtttgtgagatagcaat

SEQ ID NO: 2476 - DNA, 217 bp, Cyanidium caldarium
  Clone ID: LIB190-050-Q1-E1-B3
tccggaagacacagtaaatgaggcgagaaatcataggaattgaaacggattaggaacccgtgtagtctatgcagtaaaataaagaatgagtacgaaaaacgggagtcattccaccaggggagtataggcgcaagaaagaaacccaaagcaattgacgggaatcggcaaaaggagtggatcacgtcaattaatcagattaaaccgagaagcttacctc

SEQ ID NO: 2477 - DNA, 369 bp, Cyanidium caldarium
  Clone ID: LIB190-050-Q1-E1-C1
atggcacagaatgctgcccgtaatacgctgaaaagtaatcaaatacgactaagatatttgcgcaacttgattctgggttctaacttttcctacgttgttgtgcgaattttccttgcaaggcatagttttactgttgcacaatttcgtttatggttgatttctcttatcctcgttgcttgtagttatttcttcttacaagacgccgcaaaaccaacttttgagagaggagtcctggttgatggaggctacgacatctccagcaaggggttggatggaatattgtcacgagatgatttagatctgttgttttacagtcgtctgtgccattttttccaacaagttttgggtcacgttgttgctgataccaac

SEQ ID NO: 2478 - DNA, 351 bp, Cyanidium caldarium
  Clone ID: LIB190-050-Q1-E1-C11
cggtcgacccacacgtccacccacgcgtccgcccacgcgtccggatttacgaagtgcacagtgcctactatcaaacctttttgactgtttctggcaagtcagctaatcggtcttccgggttggataagaaaacgtgggatgccatacgtagtgaagtagagatgcaagttggttagtctgttgtagatgtgttttttcgtgtgcaagtaaaggtttttttgtttgcgtgtcgaaaaaaaaaaaaaaaaaaaaaaaaaaaaaaaaaaaagaaaaaaaaaaaaaaaaaaaaaaaaaaaaagggaagaagaacaagagggataagagaaaagataagggtgtatgaaaagtaaa

SEQ ID NO: 2479 - DNA, 281 bp, Cyanidium caldarium
  Clone ID: LIB190-050-Q1-E1-C3
ttcagatatgagacgtgtcaagagaccaaacttttctgtgcggtttacaaaaaataagtttcgtgaagaaaaccccaagaacgcctaatattagtagaaaccttgtactgtttcggtttcctaccgagtctgaaaataccggcaacacaacaaagtcgcctagcttacaagtgtcgtctcacgggacgccttcgacccttcataatcccccggaatcttcgtatcctgagtatttcgtgaaaaataagtattcactgtatagaacgggactgggttgaaaa

SEQ ID NO: 2480 - DNA, 383 bp, Cyanidium caldarium
  Clone ID: LIB190-050-Q1-E1-D5
cgtccaagcgaaacaagagaagggaagtaaaaggtaagaaagaggaaaggtttacgagagaaggaagtagaaagaagagagtgtaaggcggcgtcataagagaaatccgaaaggagtagaagaaaagagagagaagaaagaaaagaagagaaaagccgtactgaagaccgacacaggtactcgaggagaaaggagacccaaattaaggtgagagaatggacgataaggaactaggcaaaaggatatggtatctgcggtagaacatatgaaagaagcagcaccgactgtttagccaggacacagcactctgcagaaaagagaaaatgtaaagtatagagtgtgcgggctggcaaatagtagagaagaaatcgatgaaagtgaaa

SEQ ID NO: 2481 - DNA, 452 bp, Cyanidium caldarium
  Clone ID: LIB190-050-Q1-E1-E10
ttcccgggcaacgaacaatcacgaagaactttgagaaagaattgtggtcaaaagtactctttatggaaaatgattttaggaaaacatcgattacctcgtacatgttgctttttggctgcttcaagagatgcctcattcgctgcagcttttactattctaccaaccgcgggagaaccgcaaaagaatactccaacagcttccggatcccgaataaagtcttctctctcgaatatatttgaaaataattggctccattgcggtcttccgatatgatatcgaatttttgaggagttttctggcagcgagagttcattgacaactcctgtaacaaagatatctatttgaacatctacaggactgtcttctgaaactattcgttcaaagtctcgaaagaaccagtgaaaaccatgaactgttctgttgacccaaataaagtgaagtgactttgatgg

SEQ ID NO: 2482 - DNA, 428 bp, Cyanidium caldarium
  Clone ID: LIB190-050-Q1-E1-E11
atttttccaaatatcctttgcgaaaacatgtttcgtctactcacgaaaagtattgcaccagttactaaaagcattttgttatccacagtaaagtataatagtcctttgcagctgagtaaagcagagatatggagagcttcctatccaattggaagcagacgttcctttgcagaacaaaaggcacagcagcagtccaaagaaggtgaagaaccaataacgccttatcaacctgtgacggagaagctggataaaagagacccaaactaaccttggaagtggagaagttttcttcctgaacatagctacaaacccaacctcaatatcaatctggaaaggcatcatacacctttaaagatttagagatagggtagctcgggggaatcgtcaagtttttaagattttttgcggatgccttttttcagaaacga

SEQ ID NO: 2483 - DNA, 290 bp, Cyanidium caldarium
  Clone ID: LIB190-050-Q1-E1-F5
tagagggactttatgtcgaataggaggagaaaactcgagtggtacgtagtggctgtctttctagtagtttgttgctcgtgtcgtcaagtgtcgtcctttgatttcatatgcgaagctagttggcaggctgaagacgtttgtttcgaggacgacatagaacaaggaggtgtcttaagcggcaactttgatgtgttggaccctgaagagtcggatgtcgatgtagagttggatcgagtgccgcgagaaggagctcccgagtgtgagtgggagtggagaggggtaaggggggt

SEQ ID NO: 2484 - DNA, 332 bp, Cyanidium caldarium
  Clone ID: LIB190-051-Q1-E1-A5
agcccacgcgtccggttgtatagtaatattttaccgtatttgaaacaaagattggacggtatctattgtcatcaaccaccgcttgcagacattagaaatgaaaaccgaaaagatatattggccaatgttattatcgatgaacaacaatatcgattgtctttgaccaatactgccaaattgttatgcattgctgcttatatggcttctcatatttccccaaaacgagactcgaagatatttacaaagaaatcgacgcgtgtcaaaaaacatcgcaggagaaccaactcatccactctgacagaagccattccctttcgtttagaaagactgtt

SEQ ID NO: 2485 - DNA, 424 bp, Cyanidium caldarium
  Clone ID: LIB190-051-Q1-E1-A6
cccaagcgtccgtccacgcgtccgcccatgcgtccgcacacgcgtccggacccaagatatcaaaagttttagattggatgaatgctgatgaaatgttatcgagaggctttaaagaacatatttatgaggttttccaatataggccggcacactggcaagttggcacttttctccgccactatgctgcaggatgtacgaaaaatgacggagaagtttatgagagatccagttgtgattttggtgcagaaagatgaacttacactggaacgtatcagacaatactatatagcagtggaagtcgacgagtacaagtttgatactttatgtgacctctacgaaactttgactgttacgcaggctataacttacgtgaatacacggacgaaagttgactggctcacacaggagttgcgagaacgcgact

SEQ ID NO: 2486 - DNA, 391 bp, Cyanidium caldarium
  Clone ID: LIB190-051-Q1-E1-B10
cccacgcgtccgtctcaccccaactagtagaagaatatgttggcgtttacttgtctcacagactgtcgttggttagagacttctcgattctccagatgtgccaaagccaataccgtctcgttgcgacgtagttcccagtgttcacactcttggaggagtgtttcgatgaactacagtccctattcgataactaccgacaaatcagaaggacatattgttcccggtactttttcaagatttgagtttcttgaaggtcgagtcaccggtccaaccgtcttgaaccctagcatacttgactttacagtgtccaatgtttcagatgctgcctttggagaatggagagcaatatcggcttcaagtagagcaaaagaactggaacacagaagaaacg

SEQ ID NO: 2487 - DNA, 383 bp, Cyanidium caldarium
  Clone ID: LIB190-051-Q1-E1-B4
acgcgtcagcccacgcgtccgtttccaacttatgtgcgtgcagcaggaacgactattactacttggtttgtgaacgctttcaactttgcgctttcattctcgtggccttctatgaaggctgcatggggacctcaaggaggtttcggattctatgctggtttcaactttcttggcatcgttatgcagttcttattcttacctgaaaccaagggctttacattggaacaaatgagagtcgtgtttgaggagggtttattcaccatcgcagcttatcactgtcgtgctggttggagaacacttcgtaagcttttgggacttccagttccagacactcctcttgtttctccctactataacgcctacgctattgaccgcgcttagag

SEQ ID NO: 2488 - DNA, 95 bp, Cyanidium caldarium
  Clone ID: LIB190-051-Q1-E1-B5
cccaagcgtccgaatgggcatagatgtcatggtaaccaaggaaggtatcgtgcaacacatcactcttcaaaagacagcctccaaatgcaactttg

SEQ ID NO: 2489 - DNA, 363 bp, Cyanidium caldarium
  Clone ID: LIB190-051-Q1-E1-B9
cccacgcgtccgcccacgcgtccgctttttttttggtgaaagaacatggcagttggaaagaataaacgcctttcaaaaaaaggcaagggagtgaagaagaggttgacagatccgtttcttagaaaggaatggtacgacataaaggccccagcaatgttttctcaacgtcaggttggaaagactttggttaccaagacaaccggaaccaaaattgcttcggaatcactgaaaggtcgagtatacgatgtttgtcttgccgacctgagtagcaacaaagacgagagtttggcgtacagaaaaattcgtttgcgttgtgaggaagtggaaggaagaaactgtttgaccaacttttatggaatggac

SEQ ID NO: 2490 - DNA, 109 bp, Cyanidium caldarium
  Clone ID: LIB190-051-Q1-E1-D10
acccacgcgtcaagtcactggaaagtattggaatagtaagttgatactttgaggcctgcttgaaaagtggaatcatacttgtctaccaagaatgtctcttcgtttcaca

SEQ ID NO: 2491 - DNA, 423 bp, Cyanidium caldarium
  Clone ID: LIB190-051-Q1-E1-D3
gtccgtttgaatgacagaattaggtagtagtaagagacagccagttggggttcaagagtctccaagaacaagtgcagaaaatgagaaaaaggaagctatagctaacttagctgtcatgtttccaaacttgtcgcgcactgagttatcgaacgctttggaagctaatagctattcagttcaaagaacggttgactacatactctcggaaaagtcctcctcctcacccgccgcggcagcagaagatgcgtccgaagttgccgctcgcatcgctcaggtagaggaagacgaacgtttagctcgtgccttgcaaagcgcttatgaacgggaaaataatgttgaaagacagaccatgtctcgaacgagttgggactcatcagcagcacaaactcctttgttggaaaagctcaaattatacggaagagc

SEQ ID NO: 2492 - DNA, 84 bp, Cyanidium caldarium
  Clone ID: LIB190-051-Q1-E1-D4
acgcgtaaggtcaatttcaatgattcacttaggtcgtagtaagagacacccagttggggttcaacactctccaagaacacgtcc

SEQ ID NO: 2493 - DNA, 201 bp, Cyanidium caldarium
  Clone ID: LIB190-051-Q1-E1-D7
cgactcaagcgtacgcccacgcgtccgtatgtgtaatattcaagaagaggctcggggcaattatgagaaggttggcacatgtaggtgctctaagaggtatgtagtcagctctagggttgggtgtcatgtgtccacagttgtctaccagtggattagcgagcgctttggaaggtgatagcgattgagttcaaagaagggttc

SEQ ID NO: 2494 - DNA, 231 bp, Cyanidium caldarium
  Clone ID: LIB190-051-Q1-E1-E1
cccacgcgtccgcccacgcgtccggattgttgaagaaataaacaaggagaatggtttttggtaaaaaaaaaaaaaaaaaaaaaaaaaaaaaaaaaaaaaaaaaaaaaaaaaaaaaaaaaaaaaaaaaaaaaaaaaaaaaaaaaaaaaaaaaaaaaaaaaaaaaaaaaaaaaaaaaaaaaaaaaaaaaaaaaaaaaaaaaaagacagcgaagaaaaagaaagagaaaggcaa

SEQ ID NO: 2495 - DNA, 120 bp, Cyanidium caldarium
  Clone ID: LIB190-051-Q1-E1-E11
tggctttcttggtgcagtcccgtaaaagtagcggctcccagaagacgtggctcaattggttttggacaaggttctatatgcagtagattggctgtctcatgtgggtcccctatctgcgaa

SEQ ID NO: 2496 - DNA, 211 bp, Cyanidium caldarium
  Clone ID: LIB190-051-Q1-E1-E5
cgacccaagcgtacgagcaaactgtgtttttgcggacctccttggaatccaagttgcatatttgcttgaaagaagtccaatgaaagcgtttcgacaggagcccaacatggctcgtgagcgtttgcagggtagcaattcacgaacggaagtcgatacggactagcgctccagtgcacaacaacgcagtcgcagcgcctagttctgccacccg

SEQ ID NO: 2497 - DNA, 422 bp, Cyanidium caldarium
  Clone ID: LIB190-051-Q1-E1-E7
agcccacgcgtccgcccacgcgtccgggaagcagaagtattcgtagcaaagttgggtagctgggcgacagtcatcaaactgttctatcagacagtgaaatgctttcctaatcaagtgggaaactaccaattacttgttcagcacgagtgaggataacttgaacaaatcctcatatggaatgtgacacaacgtatctcaactaagaaacaatgtgaaatatatccaacaacgtcactttttattattgagacaaacttgatggcggagcacaaaacaaccacaaaactattgcgtctgcattctatatcctcgcagttgaaatagaaattcgaagcctatttggagagtggccagtttaagtcatctgttgaagaaaccctttctctgtcaaacccacaaaagcgcataatatgttgtttttt

SEQ ID NO: 2498 - DNA, 262 bp, Cyanidium caldarium
  Clone ID: LIB190-051-Q1-E1-E9
gtcagcacatttggctggattccgagagagtgcatggtgtcacgacaaacgtttgctgaagacaagacttttacgtttttatccttttcaatgtctgcagtggaagtcgtacaggtaaatgttctaaatgatcctggttgctttcgagacacgttttgttttgaaataacttatgaagtgagacaagcgtgacaacacgatagtgagtggaaagtaatttaggtgagttgtgccagagaggagagtctggaccaagttttgg

SEQ ID NO: 2499 - DNA, 358 bp, Cyanidium caldarium
  Clone ID: LIB190-051-Q1-E1-F1
cccacgcgtccggcgttccacacgtccgagtgttgtgtcttgtcgttaatagtcctctctagagacttcaatataaaataacaaacagttgtaaaaagctattcacttttctctatgagaacgagtgctcaagtgtcacgggggttttgcgcgatagaacgatatacgagagcagacatgttatagctggtctacttggaagcagtttggagtttacaagagaaacgagttgggctctgttgtgtcgtttttcaagtttacatacgtgaatactccaagtattgaacaataaattggtttatttacgacaaacaaaaaaaaaaaaaaaataaaacaaaaaataaaaaaatcaacacgg

SEQ ID NO: 2500 - DNA, 377 bp, Cyanidium caldarium
  Clone ID: LIB190-051-Q1-E1-F10
gacccacgcgtcaggaagcgctgtacgcaaaaaattgaacaacactacagatagcgatagtgcgtctgatatgactggacatatatctgatagtattgtttatcactcaggaggagatgtctcttctgatcaaaattccgtgggttctcgagaagatagtataccggagagttaccactcaactcgtcgtcgtgattatattgattggaatactttgaaaaatcactttcaccttccgatgaatgaagcttcagccaaactgggtgtatgtgtgacggtattgaagaaaatatgtcgtcgtttcggaatatcgcgatggccacaccgcaaattgaaatctgtagctagacacattgaaagacaagaacgagcttttt

SEQ ID NO: 2501 - DNA, 411 bp, Cyanidium caldarium
  Clone ID: LIB190-051-Q1-E1-F7
cccacgcgtccgcgctcaatatacttcttactacggcgaatcatcctccagctattattaccgagcagctgctcctcagagatggtatgaggaacaatgcacctcatactgctgggttccagtacagacctatgaaacttatcaatgttctcaagagaagaagaaggagtacagctatccttgtcaaacttatgagcaggtttcaactacttaccagtgtggtcagtacgagtcccaacaagtttactaccaatgccaaaagtataaggaggttactcagcaagaatgccagtacgtccaagagtcgtattgtgtcgagtatgaagaatgtcagcaagttacccaggaagtttctccttcagaaattgtctactacggtgaatcttcttctagcagtagttactactacta

SEQ ID NO: 2502 - DNA, 211 bp, Cyanidium caldarium
  Clone ID: LIB190-051-Q1-E1-F8
gacgcacgcgtacgacgttatgcagttgtccaagctattttaagtgaggaagacagagtcgtggtcatacactttggtcaggactttgacccgacatgtatgttgatggacgaaacagtttacaacggcagcagaaatgataataatttttgctgtcgtctatttggtctatatgcgggaagtccctgactttcacgcgatgtaccacctg

SEQ ID NO: 2503 - DNA, 343 bp, Cyanidium caldarium
  Clone ID: LIB190-051-Q1-E1-G1
cccacgcgtccgaaaaatgttcgtgtcttactccgtacctgcaagaaacttaccggctttggcacgtaacttttccaatgtctgtctctcgaggagtggtctgagagggggatgtttacgaaatgtgaaagttttcaaccacaaacgacctgcaaggttgttatctacgaaaatgagaggaggcgaccatgaaaggagagaacttagtcgtcctatgcgtacgcttgattccgctttcgacgaacttttagcttttgcgcaggatccctggtccatgtttcgctctccatggagtctgtcgcccagaagtatggcagtagacacgtggatgcctcgtgttgac

SEQ ID NO: 2504 - DNA, 274 bp, Cyanidium caldarium
  Clone ID: LIB190-051-Q1-E1-G3
cattatctgcgttgtttggtgatttcttcgtgggtttgcgtctcaagatgtcatttttgaaacgtatacagtcgactctgctttccaacagaaactcagtaactaagacgagtgaggccaattcccacatacagcacgttcgagtttaccgctgggactctgaaaatcggagaagaacctaaatgtggtcacgtaatccattcctcccaagtaatgcagtcccatcgtgttggacgccctcatcaggacatacaatgacatcgactctaccttt

SEQ ID NO: 2505 - DNA, 367 bp, Cyanidium caldarium
  Clone ID: LIB190-051-Q1-E1-G4
acgcgtaagcggacgcgtgggcggacgcgtgggcggacgcgtgggcggacgcgtgggcggacgcgtgggttcgcacatcgataatccacccaacagaacaacgctggtggtaataagaggagcagcagctggagcacaaggtgatgatccatcgcagcagcagcagcagaccttgccggggtcgttttgtaccacgacagacgacctgtggtttgtttgtaacaacaacttggtgtcatgaaaattccaagtggagtaatggcaagttattgcctcgtcaaagttttatttccactgggcgcgcctattagaaacgttacaaccatagaaaggttgttgtggttcctacgaaaacttgttgggccaa

SEQ ID NO: 2506 - DNA, 263 bp, Cyanidium caldarium
  Clone ID: LIB190-051-Q1-E1-G5
cggacgcgtgggatgttaatgttgcagtatacgacagagaagagtgtaagggtagaggaaatgaatatcctggaaggagaatggtaatgtatggactaataggagtaatgataatgatgacgttaagagggaagggagtactgggagtacatgtacgaacgtcatggttagggataagtagtgtaataataatgggaataatgggaatgatacatgtggtaagtacgtcatacacaaacatggagtccatggaaaggtttacc

SEQ ID NO: 2507 - DNA, 420 bp, Cyanidium caldarium
  Clone ID: LIB190-051-Q1-E1-G7
agattgtcatcatgaaagctgccgtctttgcattctttgtcttagcactatgcgccgttgctattcaagcttctcctctagaggaaactttgggtgcctttatgcggggtggttatcaatcgcaaagccaagcaccaaaacctagctgttgcaagttgagctgtcaatatacccaaatttgtgaacaagttatccagactcagcaagttatccagactcagcaagttatccaaactcagcaggtcatccaaactcagcaagtttaccaaacacaacaagtgcagcaaacacaacaagtttcgtcagcatacggacgcaatgaggtatccagagggggatatgcccaacagtctgtaaccccagctcctgcaacttcccgtggtccacggttcaagtcaagtgctgtaattagtgctcatc

SEQ ID NO: 2508 - DNA, 418 bp, Cyanidium caldarium
  Clone ID: LIB190-051-Q1-E1-H1
cccacgcgtccgacaaagtgtcgtttacaaaagaaagtatcacatattccctcgtattgtgtgaggatgagttgggttgcaactttaaaatcttccaaaatagaaggctcctctgctattccagaaggtgaacagcctgacctccatacaaagtgggagcagtgtttacaagagaaagggtcaccagagtgccaacagtgtcaaggttcaggacaaataccatgtcctgcatgtgaaggaaagggttatttcgtgatggaagttttcaatgttacctctagtaaccagtgtcaagtttgccgtggacaccgtaaaactccttgcccaacttgtaaagaatacatttatcgggcagtaaaagaattatgatataaagtaaagctcaatctttagaaatggaaatattgcctccagtaac

SEQ ID NO: 2509 - DNA, 369 bp, Cyanidium caldarium
  Clone ID: LIB190-051-Q1-E1-H10
gaggcacgcgtcaggtcctgatgtcgcgctcttcggtacaaggtaaaaaggaagagggagttgccaatgggacaagggttggtacagcctttggggacggacttttgcctcaaagtcactctgtagacttgtcgtctcagttgggcaccgcagcggaaagtgaatttgtcgtcgacaatgcaaacgatactgagaaccatcaagtgggcgatagcaccattgaactgaattccaataccgaagtggttcacgaccaagtagaagcgactcattcgacaagtggaggcgcagcacttcgagatattgtgctgggaatgtcagatggcctcacagttccttttgcactagcagctggaatggctggtgcct

SEQ ID NO: 2510 - DNA, 411 bp, Cyanidium caldarium
  Clone ID: LIB190-051-Q1-E1-H12
acgcctgcaggtagcggttcgggggtcgagggacgagtcaggctgttctgtatggacctcgataaggagactatcgaacgcatatccaagctgtccccggaagaaagaaaccaagtggaagaacgtgtgaagaacgagatgttgagacaagtttttcaagagctcgttcagactatatctgaaaagtgtttcctcaagtgcatcacgaagcctggaagttctttgacatcaggtgaacaaacttgtcttgcaaagtgtatggatcgctatttagatgcaatgggaatcgtttccaagacgttaatagagagaagttcacgtaactctaactagtttgtgtttgatccgaggatttttgacctgttagaaattgcagcgtcctgaagctaggatagtggaacaagaactagt

SEQ ID NO: 2511 - DNA, 290 bp, Cyanidium caldarium
  Clone ID: LIB190-051-Q1-E1-H4
acgcgtcagcggaaacgtgggcggacgcgtgggaagaggcaaatacgggaaagcagtaaaagaagaaagagaaaggaaaaaactgagtatcaggaagaaaagagggagtagatgaggaaagaaagatcaaggaagtaagagtaagagaaggagtaatgtgaatgaaagcaggaaagtatttgaagaagagagtgtaaagcgcgtaccttttgcataatgtcccagcgagtgaaagaggaagcaaaaagaaagaaaaagaagtagccaggtaagacccgaagctagttgat

SEQ ID NO: 2512 - DNA, 336 bp, Cyanidium caldarium
  Clone ID: LIB190-051-Q1-E1-H7
cccacacgtccgctcacgcgtcagactcgaccaaagttgcaaacacattcgtttccagatactcttatatggtcgcgaagtgtctgaaacttcagctctcctatatgtatacccactggaaaaacatttagcttccttgatggacataggtatagagtaccagattgcttcaagtggtggcagaatggtaacgacgatggatcgatatgaaggatattgtgcaaacgtacaaagaggctggcttgctcatgtgctatctgacacagaatctatcacgacattttcaagtgcttctgatgctattcagatcttccgtaaggaacataatggagttat

SEQ ID NO: 2513 - DNA, 346 bp, Cyanidium caldarium
  Clone ID: LIB190-051-Q1-E1-H8
cccacgcgtccgcccacgcgtccgcccacgcgtccgcccacgcgtccgggcgctggtggttggtttgggctattgtgtccctcactacgaggtttggttttctgttgtggtgaagactttgtttagcaacttgtgtgcaaaaaatggtcaacttgttgtatactgatgagggacgaaacctgttaaagggctaccaactcattttatatgttgctatgttggctttctccgccactattttggggcttatggggaatcccatgtttaatctctatctaattgccaatgaatatagacacccggatcctagcgaaccttttgtacccattgacaaagtgaagaacgt

SEQ ID NO: 2514 - DNA, 301 bp, Cyanidium caldarium
  Clone ID: LIB190-051-Q1-E2-A1
agcccacgcgtccggttgtatagtaatattttaccgtatttgaaacaaagattggacggtatctattgtcatcaaccaccgcttgcagacattagaaatgaaaaccgaaaagatatattggccaatgttattatcgatgaacaacaatatcgattgtctttgaccaatactgccaaattgttatgcattgctgcttatatggcttctcatatttccccaaaacgagactcgaagatatttacaaagaaatcgacgcgtgtcaaaaaacatcgcaggagaaccaactcatccactctgacag

SEQ ID NO: 2515 - DNA, 338 bp, Cyanidium caldarium
  Clone ID: LIB190-051-Q1-E2-A10
aacaactagcccaaggatataaagaaggaattcattggagtagaagaatatttcatacaaggaatggaatattggctctcctgctttatcatagagataaagtgttgtttcaaaaagtcgttggatatttattagtattgttgatatgtttggagtgtattcggttgcatagtagttggctgaatgagttggcaagtcgcttattttatcccattatgagaaagaacgagactagacgtttcagtggaatgggttattatcttgcgggagtcctgtatgcttcctgttattttgactcggttgtttttgatttggttgttattcatttggctattggt

SEQ ID NO: 2516 - DNA, 333 bp, Cyanidium caldarium
  Clone ID: LIB190-051-Q1-E2-A11
ggtcaggagttcccggcacgactaagccgaagcgtcggcccaagcgtctggtctcattgtagtcgtaattgaggaatacgcagggcgacagtaacgaggggaatggttataagacagtatgtgataccgagtcgtgtatcgcagctcgtcggcgagtttcaagagcgcaaggctggatgcaactttacatagaacaccgggaagtacgaccgatacatctgacatctatttacctgtatgtgtccttcatcggtcattatgcctttattgaaggttgtccttgggcggcaagaaacaaggctagtcattccagtagaacgttttatgaccttg

SEQ ID NO: 2517 - DNA, 378 bp, Cyanidium caldarium
  Clone ID: LIB190-051-Q1-E2-A2
gcgtcagcccaagcgtccggttgtatagtaatattttaccgtatttgaaacaaagattggacggtatctattgtcatcaaccaccgcttgcagacattagaaatgaaaaccgaaaagatatattggccaatgttattatcgatgaacaacaatatcgattgtctttgaccaatactgccaaattgttatgcattgctgcttatatggcttctcatatttccccaaaacgagactcgaagatatttacaaagaaatcgacgcgtgtcaaaaaacatcgcaggagaaccaactcatccactctgacagaagccattccctttcgtttagaaagactgttggctagttatcgcgtcattcaacaacaactgggccaatcat

SEQ ID NO: 2518 - DNA, 110 bp, Cyanidium caldarium
  Clone ID: LIB190-051-Q1-E2-A4
agccacacgtctgacaatgagttaggacacgagtgtgagtgacgtctagagcaggaagtattccttcatcacttttcgtactaactgtcttttggtatagtttcttgtgt

SEQ ID NO: 2519 - DNA, 245 bp, Cyanidium caldarium
  Clone ID: LIB190-051-Q1-E2-A5
gcgtcaacccacaagtccggttgtatagtaacattcgaccgtagttgtgataaagattgagcagtatctattgacaacacacaccgcttgcagacacatacaaatgtatatatcggtgacataatggatccggtaaatatcgaatttttaccatcagctgaatgtctctgtccactactgccaaaatgttcggcaccgctcctcaaattgccgcccacaccaccccaccgcgttattcgacaatg

SEQ ID NO: 2520 - DNA, 350 bp, Cyanidium caldarium
  Clone ID: LIB190-051-Q1-E2-A7
agcccaagcgtccgtccacgcgtctgcgcatgcgtccgcccacgcgtccggttacaatatatcaaaagttttagattggatgaatgctgatgaaatgttatcgagaggctttaatgaacatatttatgaggttttccaatataggcctgcacactgtcaaattggcacttttctccgccattatgccgcaagatgtactaaaaatgacggagaagtttatgagagatccagttgtgattttggtgcagaaagatcaacttacactggaacgtatcaaacaatactatataccactggatatcgacgagtacaagtttgatactttacgtgacctctactaaactttgact

SEQ ID NO: 2521 - DNA, 394 bp, Cyanidium caldarium
  Clone ID: LIB190-051-Q1-E2-A9
agcggacgccgtgggcgcggacatagaatggcaacagataaagtcagctaagaagatatactcttatgtaaaagaatcaaaaactaaagaatatttggagctagacgattcgttgcagcagccagtggattcatcttgtagcaccaagtggctgtttattgcaaccccactgttggaagttgcttgtactgatgggcagcgaattgaaatgattcctttgaagaaagatataaaggaattgtttttctctactttaaagaagaactttgagtcgaacgaagcgtcatgggagtgcagtgtagttgaaaccgcagttgctgtttttatccagtattatgaacagtgtgtggaacagtactatctagcaagcatagattatgagctacctggttat

SEQ ID NO: 2522 - DNA, 380 bp, Cyanidium caldarium
  Clone ID: LIB190-051-Q1-E2-B11
cggcacgcatcagcccacgcgtccgcccacgcgtccgttccgattccggcaaatgaggagccttttccaaactacgcatagtatggatagacgatacgagagagggatgggtatcgagttggggatcgtactacatggcaaatgtgtgtggagtaatgatttatcacgatagacactgtcttcactaacgctagaacaggagaaacgagagaacaacagctacactaattacttttccggtctctacactttattcctggtgaacgaaaaaatgcaagggacatgaccgcagacagctacttgggttgtatccccccagaataaacacttcctaaactcccatatgtcaccaatacacgtgtaaagattttactggcatt

SEQ ID NO: 2523 - DNA, 399 bp, Cyanidium caldarium
  Clone ID: LIB190-051-Q1-E2-B12
cgcgtcagcccaagcgtccgcccaagcgtccggaagtaaatagacgtttgaaatgcgtctagtatgaaaagagacacgagtgtaacactgtccaatcctccaactcagcgaaacagcaggaactgtgaaaatgcagttaactagcagtatgacggacagaccccaaaagtcttgactagataggttcacggaggagagagaatcatgaagtacaggaggtggggtaagacatgaacgaccactgcatgaggataacgaatctgactgagtaaggaacctaagcttaagctagtttggctggggaagtttacctaataaagagtaacttaggcaagcataggcatgagagaagtataatagcacacgcatgcatgaagataaagagtgagatttcagaaa

SEQ ID NO: 2524 - DNA, 368 bp, Cyanidium caldarium
  Clone ID: LIB190-051-Q1-E2-B4
cccaagcgtccgtttccaacttatgtgcgtgcagcaggaacgactattactacttggtttgtgaacgctttcaactttgcgctttcattctcgtggccttctatgaaggctgcatggggacctcaaggaggtttcggattctatgctggtttcaactttcttggcatcgttatgcagttcttattcttacctgaaaccaagggctttacattggaacaaatgagagtcgtgtttgaggagggtttattcaccatcgcagcttatcactgtcgtgctggttggagaacacttcgtaagcttttgggacttccagttccagacactcctcttgtttctccctatgataaggcctacgctattgaccgcgc

SEQ ID NO: 2525 - DNA, 312 bp, Cyanidium caldarium
  Clone ID: LIB190-051-Q1-E2-B7
aacacaactattctttattttcgcaaaccttgtgccttcactcgaaaaatgtgtcttcctttgcaaaaatcggcatacttttgcgtcgataataatgcgcaaacgaaagactagcggcaagagctaaaacaggggcaccaacagtcagtgatggacaaacctcaagtggatcaatccacgttggtaaagatagacttgtctcaaggcagctttaaagtagtctaagactgtgacacagatttagaagtgtgattataaggccaagtttcaattggaacttatgcagtacgggctctgttcacctggctgttg

SEQ ID NO: 2526 - DNA, 397 bp, Cyanidium caldarium
  Clone ID: LIB190-051-Q1-E2-B9
gcgtcagcccaaacgtccgcccacgcgtccgctttttttttggtgaaagaacatggcagttggaaagaataaacgcctttcaaaaaaaggcaagggagtgaagaagaggttgacagatccgtttcttagaaaggaatggtacgacataaaggccccagcaatgttttctcaacgtcaggttggaaagactttggttaccaagacaaccggaaccaaaattgcttcggaatcactgaaaggtcgagtatacgatgtttgtcttgccgacctgagtagcaacaaagacgagagtttggcgtacagaaaaattcgtttgcgttgtgaggaagtggaaggaagaaactgtttgaccaacttttatggaatggactttgccagagacaagctttgtgggctc

SEQ ID NO: 2527 - DNA, 161 bp, Cyanidium caldarium
  Clone ID: LIB190-051-Q1-E2-C10
ctgtctgcagatatccaaatgtctatcaatactatgacgttcaacattggcagcatccgttgcaagtgccacgtacgcaatccatcagagtggtaggaactatacctctatagtgaggttgaatgaacagcataatctctaagacataatcttgcggaatc

SEQ ID NO: 2528 - DNA, 149 bp, Cyanidium caldarium
  Clone ID: LIB190-051-Q1-E2-C11
ccttttctacactttcatagttaatttaacactcatttctatacaacctgtacgttttgtatatatgagtggtggttcctcattgttactcatagctgagtcgggatatctttataaatccaaaatttttcttctcgtttatcaaaaat

SEQ ID NO: 2529 - DNA, 172 bp, Cyanidium caldarium
  Clone ID: LIB190-051-Q1-E2-C6
acccacacgtcaaggagagtagcttggtatgcagcgatggataagttctaacagccgctggttttggtgcagaccgtgcgttaggatacatgcctgactactcagtgacgtgattccggatgacttcccaactgtgctgtaattgcggctaggggtcgatcgttgaaaacgc

SEQ ID NO: 2530 - DNA, 373 bp, Cyanidium caldarium
  Clone ID: LIB190-051-Q1-E2-C9
cgcgtcagctggagactagacctagtctgttgtcgcaatgaaactcactctgtatactctgtgtgtattgtctactgtaattctgatcatgagagctcaacctatgatacctcgtactggtcctcctttaaacgactggattcaagaggtagaggaatggattccaagataatttccatgatctgtccaaggaaattttgacactattattcgaggattcactgcattgggctgtattgtatccactgactcattcatataagtcgactattattactccttgattctagattctgcaatttttttgcaagtaattgtaactatgtatgagagggcaacagatcattaggagatcgatagacttgatactatt

SEQ ID NO: 2531 - DNA, 138 bp, Cyanidium caldarium
  Clone ID: LIB190-051-Q1-E2-D1
gcgtcagcccaagcgtccgaagaggtgtatgatgcaggcaaagaagtgacgcagtagatcagagagtaacacatgcaagtaggtaaagcgaacgggtgagtaaagaggtgtgaaagactggaagaacatgagagcagc

SEQ ID NO: 2532 - DNA, 94 bp, Cyanidium caldarium
  Clone ID: LIB190-051-Q1-E2-D10
cacgcgtcaggtcaatggaaagtattggaatagtcacttgatacgttgaggtttgcttgaacagtagagtcctacttgtatacttcgaaagttt

SEQ ID NO: 2533 - DNA, 154 bp, Cyanidium caldarium
  Clone ID: LIB190-051-Q1-E2-D11
atttcgtgggattccccagagactacaaatatgtatccacacatttgctattaacaagacttttacgtttttatccctttcaatgtctgcaatggaactctgggacctacatgttctaaataaccctggtggcgttcgacaccccttttgtttt

SEQ ID NO: 2534 - DNA, 317 bp, Cyanidium caldarium
  Clone ID: LIB190-051-Q1-E2-D12
acgcgtcagcccacagcgtccgcccacgcgtccgcccacgcgtccgcccacgcgtccgcccacgcgtccgcccacgcgtccgcccacgcgtccgcccacgcgtccgcttgcatttggtgaaaagacaaagaacttggttattctcagattcggtttagtaggtatgctgatcggaacttatgtttccattatggaaatgcagaaaaatccggagtattgaattgatatggcattgttctcctctttctcttgttgtacaagtttacaacaaaaagcccggctttgggttttatacttttcatgtaaattttcctttc

SEQ ID NO: 2535 - DNA, 306 bp, Cyanidium caldarium
  Clone ID: LIB190-051-Q1-E2-D4
acgcgtcaggacagaaacgtttgatattccaagttgtcacagcaaagatgaatttgagtgaagaagtggacttagaagactacgtttccagaccggataaaatttctggtgcagatattgctgcaatctgccaagaagcgggaatgcaagctgtacggaagaatcggtatattatacttccaaaagactttgaaaaggcatataaaattgtcgtacgtaaagatgagcaggaatttgctttttacaaataagacatgatttgtcgaataaagaatgaatggatgcacaagttgcactttgcaactt

SEQ ID NO: 2536 - DNA, 62 bp, Cyanidium caldarium
  Clone ID: LIB190-051-Q1-E2-E1
cccacacgtccgcccacgcgtccggattgttgaagaaataaacaaggagaatggtttttggt

SEQ ID NO: 2537 - DNA, 328 bp, Cyanidium caldarium
  Clone ID: LIB190-051-Q1-E2-E11
caatgcatacagtctgttaggtaactgagaaccagagcaaatttgtcaaatttgagaataatgctaatcaagtttttgaagtagacacaagcattataggcctgggcttaaacaatatagttcctcttggaggacggggacgatacagacagcaatcccttgcctaatgtggaaggacgaattcttgcaaacgttatcgagtattgtagatatcactcactcttaaagaccattccgcactctgaggaggatattgagcgctgggatacggaattcccaaatgtagatcattttattcctttctcatttgaatctggctgcaaactat

SEQ ID NO: 2538 - DNA, 287 bp, Cyanidium caldarium
  Clone ID: LIB190-051-Q1-E2-E3
cgcgtccactacaggcaatttccatctttttcgctcattcattcttacatttcagtagatgtacaatagttttttcattgtcaaaaaatattgcacaatccacccatcgaaccacgaaaaagaaagcctttcgactctttctttctacacggtttgcatcaagaagaattagatacatagaatcatcggcaacggattggatgctggtttagaggcgttcaaccatagtccagcaaaggtagcgtcgtagcatggcctaacggccatgtaggagagcagaggtttga

SEQ ID NO: 2539 - DNA, 306 bp, Cyanidium caldarium
  Clone ID: LIB190-051-Q1-E2-E5
acccacacgtcagaccacgcgtccgcgcagcgaatccatgttgaaagagggtacacgtatattgtcagatcatcaagtttcaggtgcttcaagatggaaaacctcaggtgataacttcggatgaagtattcggaggaaagagagtagtattgtgtgggttacctggtgcctttactccaacctgctctaggcagcaccttccaggctttggacagaatgttgatgaaatcaaatcgaaaggagtagatacagtcgcttgttgagctgtcagcgacgcgtttgtgttacatcagtgggcagagtcac

SEQ ID NO: 2540 - DNA, 419 bp, Cyanidium caldarium
  Clone ID: LIB190-051-Q1-E2-E8
gacccacacgtcagcccacgcgtccgcccacgcgtccgggaagcagaagtattcgtagcaaagttgggtagctgggcgacagtcatcaaactgttctatcagacagtgaaatgctttcctaatcaagtgggaaactaccaattacttgttcagcacgagtgaggataacttgaacaaatcctcatatggaatgtgacacaacgtatctcaactaagaaacaatgtgaaatatatccaacaacgtcactttttactattgagacaaacttgatggcggagcacaaaacaaccacaaaactattgcgtctgcattctacatcctcgcagttgagatagaaattccaagcctatctggacagtggccagttgaagtcatctgttgaaagaaaccgtttctctgtcaaacccacagacgccgc

SEQ ID NO: 2541 - DNA, 286 bp, Cyanidium caldarium
  Clone ID: LIB190-051-Q1-E2-E9
ttcccgcagaaaattcgatgctccgacaagccttggatcgttttcgttcgatcatgagtttatctggtgcagtgacaatgacgagtgtctgtgatccagagtctcaagaatattcatggtcgggattgcaacacatgataaagcggcggcagatgtaaggtgaggatattatcactccgaaaaggcaagatgagtgagtcactgaggtgtgatgagtccgaaacaaaagttcgagagcagtgttgcgacaaatacatctacttccatcatacgctgtgttcttttt

SEQ ID NO: 2542 - DNA, 62 bp, Cyanidium caldarium
  Clone ID: LIB190-051-Q1-E2-F12
acgcgtcagcggaagcgtgggcggacgcgtgggaaaaaaacaaaaatcacgatgaccgttac

SEQ ID NO: 2543 - DNA, 342 bp, Cyanidium caldarium
  Clone ID: LIB190-051-Q1-E2-F6
agcggcattcgacgacgccttcgagctggagcagcgttgagtaatttctgaaacacaaatatgcgtgccaagtggaaaaagaagagaacacgacggttgaagcgcaagagaagaaagatgagacagcgttccaagtaacggaagaatcctcggacgtctgagttgaatagagttcctaaaacgtgggaaaactctatttgcaactctggcgcagtgattatatcctgctacggaaggttggaagtgtttccgaggattgttcgcaagttatgataaaaggttcttgtggtttttgttttcaacttgtaaatgccacttgtcagtcattttattcgagtaaag

SEQ ID NO: 2544 - DNA, 382 bp, Cyanidium caldarium
  Clone ID: LIB190-051-Q1-E2-F7
agcccacgcgtccgcgctcaatatacttcttactacggcgaatcatcctccagctattattaccgagcagctgctcctcagagatggtatgaggaacaatgcacctcatactgctgggttccagtacagacctatgaaacttatcaatgttctcaagagaagaagaaggagtacagctatccttgtcaaacttatgagcaggtttcaactacttaccagtgtggtcagtacgagtcccaacaagtttactaccaatgccaaaagtataaggaggttactcagcaagaatgccagtacgtccaagagtcgtattgtgtcgagtatgaagaatgtcagcaagttacccaggaagtttctccttcaaaaattgtctactacggtg

SEQ ID NO: 2545 - DNA, 313 bp, Cyanidium caldarium
  Clone ID: LIB190-051-Q1-E2-F8
agaggttatgcagttgaccaagctatttcaagtgaggaagatacagtcgtggtcatacactttggtcaagacgttcatccgacatgtatgttgatggactaaacactttacagcgcagcacaaatgataaccttttttgctgtcctctattcggtcgatatacgggaagtatctgactttaactctatgtacgaattgtatgattcttgtactgttatgttcgtcattcggaatcaacatattatggtagacttgggtaccggtattaagaagttgatcaactgggctatgactgactttcaggatcttattg

SEQ ID NO: 2546 - DNA, 81 bp, Cyanidium caldarium
  Clone ID: LIB190-051-Q1-E2-F9
cgaaatatgaatagccagatgcgatccatcacacgtaaaatttatggcttgcagtttaatgtagtgtactgacctctttcc

SEQ ID NO: 2547 - DNA, 332 bp, Cyanidium caldarium
  Clone ID: LIB190-051-Q1-E2-G10
acgcgtcagcggaagcgtgggcggacgcttggggaaataaagaaactgcacaaaaaaccccgtactttaaccgtgaaaatgaccaggcattacaaaggttaccagcaaaacttcggcagcaaattgagccatcggaggaagtactcgcccaacaaagaaaaggcgtggcagaaatcttacaaaaacacggtgtccagcctaatcaaagtttgattgaagatattgtccgtttctttcattaatccctccgtgtttgatgtttagctgcggttcaactagagttttgtttgggaacacgttggatccagtaaagaacaaaagaacttctttgt

SEQ ID NO: 2548 - DNA, 250 bp, Cyanidium caldarium
  Clone ID: LIB190-051-Q1-E2-G12
cgcctacgccttcgagttgttcctggatggatagtcctttcaattgttaatacaaacatttggtttgtgcttaattgtccttgtatctcaaattttattttgttctcactagacaactgttataaatgggggggccgcgccccaaggttctcagcttacgtactcattgtatgcaacgtcatagcttcacaattgtgtgtcaccttatcgtcacaagttctgtatgagccgatcagttttaaaatctcat

SEQ ID NO: 2549 - DNA, 401 bp, Cyanidium caldarium
  Clone ID: LIB190-051-Q1-E2-G2
acgcgtcagcccaagcgtccgaaaaatgttcgtgtcttactccgtacctgcaagaaacttaccggctttggcacgtaacttttccaatgtctgtctctcgaggagtggtctgagagggggatgtttacgaaatgtgaaagttttcaaccagaaacgacctgcaaggttgttatctacgaaaatgagaggaggcgaccatgaaaggagagaacttagtcgtcctatgcgtacgcttgattccgctttcgacgaacttttagcttttgcgcaggatccctggtccatgtttcgctctccatggagtctgtctcccagaagtatggcagtagacacgtggatgcctcgtgttgacttggtggagaaggaagatggcttttatgcatacgtggaactaccaggac

SEQ ID NO: 2550 - DNA, 323 bp, Cyanidium caldarium
  Clone ID: LIB190-051-Q1-E2-G3
cacgcgtccacattatctgcgttgtttggtgatttcttcgtgggtttgcgtctcaagatgtcctttttgaaacgtatacagtcgactctgctttccaacagagactcagtaacaaagacagagtaaggccaattacgacatatagcacgttcgagtttaccgctgggaccctgaaaagggagaagaacctgaattggttacctactcgattcctctcaaagaatgcggtcctatggtgttggatgccttattcaaaatatagaatgaactggagattacttttgtatgtagaacgtcctgccgagacggaatttgtggaagtt

SEQ ID NO: 2551 - DNA, 101 bp, Cyanidium caldarium
  Clone ID: LIB190-051-Q1-E2-G6
acccacacgtcagcggacgcgtgggatgttactgttgcattatacgagagagaacagtgtaagggtataggaagtcagtatactggaacgagaatggtact

SEQ ID NO: 2552 - DNA, 413 bp, Cyanidium caldarium
  Clone ID: LIB190-051-Q1-E2-H1
cacgcgttcacccaagcgtccgacaaagtgtcgtttacaaaagaaagtatcacatattccctcgtattgtgtgaggatgagttgggttgcaactttaaaatcttccaaaatagaaggctcctctgctattccagaaggtgaacagcctgacctccatacaaagtgggagcagtgtttacaagagaaagggtcaccagagtgccaacagtgtcaaggttcaggacaaataccatgtcctgcatgtgaaggaaagggttatttcgtgatggaagttttcaatgttacctctagtaaccagtgtcaagtttgccgtggacaccgtaaaactccttgcccaacttgtaaagaatacatttatcgggcagtaaaagatttatgatataaagtatagctcaatctttaaaaatggaaat

SEQ ID NO: 2553 - DNA, 400 bp, Cyanidium caldarium
  Clone ID: LIB190-051-Q1-E2-H10
catcaggtccaaatgtcgcgctcttcggtacaaggtaaaaaggaagagggagttgccaatgggacaagggttggtacagcctttggggacggacttttgcctcaaagtcactctgtagacttgtcgtctcagttgggcaccgcagcggaaagtgaatttgtcgtcgacaatgcacacgatactgagaaccatcaagtgggcgatagcaccattgaactgaattccaataccgaagtggttcacgaccaagtagaagcgactcattcgacaggtggaggcgcagcacttcgagataatgtgctgggaatgtcggatggcctcacagttccttttgcactagcagctggaatggctggtgccttttcaagttccaaggttattgtattggcagtattggcag

SEQ ID NO: 2554 - DNA, 187 bp, Cyanidium caldarium
  Clone ID: LIB190-051-Q1-E2-H11
ttattggaatgctccacttactgcagatgtggtatcatccgataattggagtcgtccctagtctcgtcagcttggcagcatattctgtcaaatggtctcgtgcattcacattctggccgagtgtgagtagaacagacgatgcttactgtgataagatcttggtttgtacctggtcccctatggaaag

SEQ ID NO: 2555 - DNA, 318 bp, Cyanidium caldarium
  Clone ID: LIB190-051-Q1-E2-H12
agcccacgcgtccgcgaaatggtcactcacgcaaggcaaacctaagacggcccccggacgaaagaaacccaaggggaaaaccgtgtgaaaaacaaaatgttacaacaggtttttcaagagctcgtacacacaataccgagaaaggtgttcccacatgtgcatcacaaaccccggaaatttctttgacatcaggtgaacaaacgtgtcttgcaaagtgtagggatcgctatttagatgcaagggaactcgttccaaagactttaatagagagaatttcacgtaactcaaacaattgtgtgtgagatccgaggatttttg

SEQ ID NO: 2556 - DNA, 367 bp, Cyanidium caldarium
  Clone ID: LIB190-051-Q1-E2-H2
attgaaaatcatggtagacaccaagcttaatgacggtgctagtgctgctctttggacttgccgcctagttctctatacaattgtgttagcattttcagcaacaataattggacctgatggaacgaaagcagataacatatggaacgatgccctatattatcatggaaaagtggtgaacttttgtgcatattcagcgtcatcagtatttgaaagtggcgaccatggcgcatgtcaacatgtgatggcattggcttctatcaacttgatttaagtgttctatcgttggttggacacctttgtcgacgcattgtatccaattcttacagagttctggtttgtggagcttggtatcatgatattccttact

SEQ ID NO: 2557 - DNA, 210 bp, Cyanidium caldarium
  Clone ID: LIB190-051-Q1-E2-H6
aactgaatatcaggatacatgcatggagtacatgaggaacgagagatcatcgcagtaagaataatacaacgagtaatgtgaattggatcacgaaagtatttgaagaacacagtgtaaagcgcgtaacttttgcatgatgtcccagccagtgaaagacgaagcaaagagagagaaaaacaagtagccaggtaagacccgaagctaagtgat

SEQ ID NO: 2558 - DNA, 433 bp, Cyanidium caldarium
  unsure at all n locations
  Clone ID: LIB190-051-Q1-E2-H8
gacccacgcgtcagcccacgcgtccgcccacgcgtccgcccacgcgtccgcccacgcgtccgggcgctggtggttggtttgggctattgtgtccctcactacgaagtttggttttctgttgtggtgaagactttgtttagcaacttgtgtgcaaaaaatggtcaacttgttgtatactgatgagggacgaaacctgttaaagggctaccaactcattttatatgttgctatgttggctttctccgccactattttggggcttatggggaatcccatgtttaatctctatctaattgccaaatgaatatagacatccggatcctancgaaaccttttgtacccattgacaaagttgaagaacgtcacttttcaacaagtcctctctccttctgtgcctggggtgtcacaggagatcgtacgcgtggcatgcaat

SEQ ID NO: 2559 - DNA, 84 bp, Cyanidium caldarium
  Clone ID: LIB190-051-Q1-E2-H9
acgcgtcagaaaaaaaaaaaaaattcaaaaaagaaaaagaaaaaaggaaacagaagcaggacgctcaaggacgatggcacaaaa

SEQ ID NO: 2560 - DNA, 373 bp, Cyanidium caldarium
  Clone ID: LIB190-052-Q1-E1-A10
cccacgcgtccgcccacgcgtccgatcgtcttccacgcggaagtaatatgatcgatcgaacagcattgcgcaatgttggaatgcagtatgtaacaaccgcggatgatattggacatcgcttggtcgtagagatccaactaaaggaatccagcaaatataatagtcacatgaaggaaggagaacgaccaaatgcggttacagatatcatttctacggaccctgaaatggataggaaagtatctcagtgggtgtcggaaggacaaaaggcattcttagtagaagatgagttgacgggtgaacgtcgaggaatattcttaagctcaaccaaattgaaagttcagaaacaagccagtcaggaacgaaatagcaatca

SEQ ID NO: 2561 - DNA, 392 bp, Cyanidium caldarium
  Clone ID: LIB190-052-Q1-E1-A12
cggacgcgtgggtggggttttcatgttgtcttccaccagagacgacatctcgacgagtagtactgtgaaaggtcaagtatgggcagagtctcctgatgaagaaaccaagcagtgtttgcaatctttacgttccaaagtacaatcgatggacttgactccaaaagagttggaatggtgtgacgacgcttgtctcttgagatatttgcgcgctagaaataatcatgtggacaaggctttggagttgataagaagaacgttacagtggcgaaaggaatttggagttgaagaaatgatgaacaacgtacctgctccagtgaaggaagaaggtgctagtcaaaagctgtatgtgggaagaaaggacaaatatggtcgtcctatcatttacatgaaac

SEQ ID NO: 2562 - DNA, 389 bp, Cyanidium caldarium
  Clone ID: LIB190-052-Q1-E1-A3
ggcacgcgtaagatgcaggcggcccttgatgggatattatgctttggcaaataccaaagagcctttattcgaaagtccaacaaagcaatttgacttgtcctcactacgaaagactttcttttgtattggtccggttggtttaagaagcggctaggggggaggtttgggagttggctgtgggctgggctttggtcgtgggtttgctttgagggggctgtggagtcaacgtgtcgggaggaccggtggtattcctacgcagttcttgtatggtttgccttttggacattacgtttctgggtttttgcagaacttagctcgaaaatttcctggaagttcaacaggtattggctgtggttttggtttgggctatggcgttggaattggtctac

SEQ ID NO: 2563 - DNA, 395 bp, Cyanidium caldarium
  Clone ID: LIB190-052-Q1-E1-A4
agaagcatccaaagcagttcttacaagacttgaatcttatctgtgaaaatgcttttcattataatgagaagaagtcggaagtttatgagcttgcacaggagttgaaaaaacgagtcgagaacttgatgaagccagttttgggagagtggtctgctattgaacaagcaatgactgaggatagtgaaaaggtgaattatgggggcgggcgttcagaaacacggggaagtgaagttatccccgcaccaagtcgtaggactagaaagaagaccaacactagtaaccgcgattcgaaatcgtcggacaacgtgaattcagtaaacgttgaagttcacgagagcaagtcaccaaatgctgaagatgccaaggttgtcaatatgtcgacaactgaaaatgat

SEQ ID NO: 2564 - DNA, 199 bp, Cyanidium caldarium
  Clone ID: LIB190-052-Q1-E1-A5
cccacgcgtccggagattttgcgcgccatttctctcaatggaagcttggcgaggtggtatgaagagaaaaatttgtagtcttgcgaggcagcattcctccaacaagggtggaataagaggcaacatgtgggacagaccacaggagatactgcctgatgataaaccaatattttatggaaaaaaaagaaaaagagggggg

SEQ ID NO: 2565 - DNA, 408 bp, Cyanidium caldarium
  Clone ID: LIB190-052-Q1-E1-A6
attgaagctgctgcttctttatctgaaccatcagtagccaattcgcttcgtcatcgtttgtcagagctacaacatttgcatgacgatggaaagttacttggtgatgactattagttgaagcgtgcgcgacttttgagaggcttctctgtttctagtcttatgcaaaaagttcatcatttactttcttgtacgggaagcgtgcttttccttgtgtcgtgccttgtccaaattgggatataagacagccattttatcttcaggtcctcatttcttggttgaacatgtgaaacgcactttaggaatggtaagttatttttgtctcgagcatttgactttatttaggattttgcatatggaaatacattcgaaaccgatgcgatgggcaatttcactggggaaataagtcag

SEQ ID NO: 2566 - DNA, 423 bp, Cyanidium caldarium
  Clone ID: LIB190-052-Q1-E1-A7
aagaaaagaagagaaaagccgtactgaagaccgacacaggtactcgaggagaaaggagacccaaattaaggtgagagaatggacgataacgaactaggcaaaaggagatggtatcggcggtagaacatatgaaagaggcggcaggggagtgtttagcaaaaacacagcactctgcagaaaagagaaaatgtagagtgggggagtgtgcggcctgccaaggagtagagaagaaatcgatgaaagtgaaagcgagtaaaagatgaggtatagagaatggcggtcctaacagtaaggatccaaaggtagcgaagtaaatagacgtttgaaaggcgtccagtatgaaaggagaaacgagtgtagcactgtctagtcgtccaactcagcgaaacagcaataactgtgaaaatgcagtaaactagcagt

SEQ ID NO: 2567 - DNA, 415 bp, Cyanidium caldarium
  Clone ID: LIB190-052-Q1-E1-A8
agcaattgagctagtgaaactggtggaagaatgactactttggactacaatatagcttcaactccgtttacagggccaccttctacacttcacactggtacagtaaagctggataatgaggaaatagagcgttatttatctcaactgataacagagtcttgcaagccccttgcggaagaggatgtcaaaagactgtgtgataaagcgcgggagcgttgtattgaagagtccaacgttcaacctgttagttgtccagtaactgtttgtggtgatattcatggacagtttcacgacttgttagaactctttaaaataggtggcaactgtccggaaaccaactatcttttcttgggggactatgtagatagaggatattactctgtggaagcagtaactgcccttgtttgtttgaaaa

SEQ ID NO: 2568 - DNA, 346 bp, Cyanidium caldarium
  Clone ID: LIB190-052-Q1-E1-B10
cccacgcgtccgaacttgacatgcaacaaagtaaccttcgagtagtccaatcttctttggtggcaagctttgtcctcattctaagtataatctgtgccattcatgcagtaacagccgatgaaataacaagtttcgagagaggataccaaacagttgcaccaactcagacgcagcaatgtcaaaagatttgtgtcaccgccacacaaactcaagttcaaagttgtatttatactcagacacaggctccgttcaggtcccaatgtgtcaaagcattgccaactacctgctataaatacttaacaaaatataagcaggtgtgctgtgagcaggaatacgagcaacagaa

SEQ ID NO: 2569 - DNA, 254 bp, Cyanidium caldarium
  Clone ID: LIB190-052-Q1-E1-B11
cccacgcgtccgatctagtcaaaacaacaacagatggcagcaaaaaactcgattacttcggaagttgtagattcctctcctagtcctatcgttgcaatagcaatcgtcaactcctcgaatcggcctcttttcactcgaacatatgaacatcctgacttggtgctgcctagcgctagaacaggagaaacgagagaacaacagctacactatttacttttccggtctctagactttattcctggtgaaggaaaaag

SEQ ID NO: 2570 - DNA, 396 bp, Cyanidium caldarium
  unsure at all n locations
  Clone ID: LIB190-052-Q1-E1-B12
cccacgcgtccggaatattgttgcaaggccagggcagcacagatatcaagttggaagcccgaaacagttattgtcgccgcgttctttgtttttactacaaacattataatggaattggggcaagaaaactctagagttcctacccctcccccacaactgcacctaatttttgagcgacccggagctctcaatactggtggtagagcagcgatggctgcactggcttctgttttgtctggaaaaaaccttgtgatacaacccaactggatggacaacgaggggtgtaacaaatattgtatggataaacgggattatatgggatgctgtagtttggtaacaatacctgaagagtggccgttgttggagtggaacgcggaaaatattccncgactgaat

SEQ ID NO: 2571 - DNA, 345 bp, Cyanidium caldarium
  Clone ID: LIB190-052-Q1-E1-B2
agcactctattatattggctatcaaatcggagtatcgcctttggcttgggccatcaacggagaaatttatgaattgcacgtgcgcaattggggaatgtcgtggggtgcagccattcttttgggtgcggcattctcagtgagcgagggatttaccagacaagtacgagcatttacgaaaactggagtatttggattgtgaggaggagttagcctcattttctggggtatccttatcattttaatgcctgagacaaatggaagaacgctagaagatattcgaaatatattcgatgaacgtttaattggattggcaaaatacaactggagtcaaaccaaaacatggat

SEQ ID NO: 2572 - DNA, 412 bp, Cyanidium caldarium
  Clone ID: LIB190-052-Q1-E1-B3
gcgaatgggagaattgagcatctttcgtcgtactttagctgaaaatatatcgatgcgatctgttgaatgcaacagcatttcaaatatggaacttgaggtgaagaatgttcctgcattttgcagaacagctggcgattcagttgagaaggctgacttgtccaatgcttggaaactattctatgagcattatttgtcaggagacgcgatttatttgcatgaaggggaaaactcttatgggcctggggttcttattcgtatatctgatgtcatgcagagttcttcgattacttgtgagggagaaccatcctcggaacaaatatcaaaccctttacagaaacaaaagacctacttgataggtatttcattgaaatgttttgatgattcatgttgcactgtaagccatgatataatt

SEQ ID NO: 2573 - DNA, 415 bp, Cyanidium caldarium
  unsure at all n locations
  Clone ID: LIB190-052-Q1-E1-B4
agctatttgatgatcatttgacatttcttcaacacaatgaagtgagctccttgttgaatgtgttgtataagctttctactagtgtggtaactattgcatacatggaacgtctccttgtgttgcaacgtattcgatactggttgttggttgccagttgtatgatgggtgtggctttggtatttatgttgatgtttcgacgttcgtgttgggagcgtgatgagttgtattacaaggccaaatctgtttaaagtcaatgttgctatttgtatttgaaaatctttttttctttttggaatatgctggtactaggttgttgttgttgtatcgagtgacatgtatttcgtctttggacaacacaagacatgtgtntttgagtagtataatanatatgcaagacgggtcgagacacacacat

SEQ ID NO: 2574 - DNA, 417 bp, Cyanidium caldarium
  Clone ID: LIB190-052-Q1-E1-B6
caagcgtagagcagaagaactgggtgtaaaggtcgagtagtagagtaagtgtaaaagggaaaggaaaggagagaaagaggaaagggatcgaatgcagagatctcgagagaaaggcaggaaagaaaagaaagtaagagagagggatgaggcgagaaagcataggaagtgaaacggattaggaacccgtgtaagcggaggcgggaggagaaagaatgaggaggaaaaaacggagtcattccaccaggggagtaaaggcgcaagaaagaaacccaaagcaattgacgggaatcggaaaaaggggtggatcacgtaaattaatccgatataaaccgagaaccttacctctccaagaaagtgttgcacggctgtcgaaagaacgtgctgtgaagtgagagaacgtacgagaaagccaagtga

SEQ ID NO: 2575 - DNA, 407 bp, Cyanidium caldarium
  unsure at all n locations
  Clone ID: LIB190-052-Q1-E1-B7
cccacgcgtccgtttgtggcattgttttgaaaaagagaggcccatcctcaccactactacgagagaagaaaccatgactacgcagttagaaagaggagaagaaggcgttgcacagcaggaagaagaaaatattccggaggacggcggagacttggccacctatgttcaaaacttgttgtctcagatgcagatgggtggtggaggcgatggcagacgcgagggtaggcagaattgacgagatgggtagtcgtatacacgaactggagaagagcatcgatgagttgatggaacagactggagtaaaggaaggcgatggaacagagtctggtgaggttactacgacaagtcgtggggagtgaatgcttcggttgtagtacgttggatatcntccagagtagctcgtacta

SEQ ID NO: 2576 - DNA, 417 bp, Cyanidium caldarium
  Clone ID: LIB190-052-Q1-E1-B8
cccacgcgtccgcccacgcgtccgcccacgcgtccgggaggtgatttccaccaagtcacaaagaatcgtaaaagagaaaatgacgataggttttgtacatccacttggaactagtgttcaatgtaacaaacactacaagactgctacttgttcttcccagttttattccaagtcttcatcgtttctagggagaaaccaggcgggttgcaagtcgtggtctcttgcctatggaagcaaggtggatcagaacaagtacacttacagtcatcctagttccgtaaaacaaggaagaggaccaactatggttgcttcgaaaacagagttggaacaacaagtaagatccagactagtcaagttgtttgagcagacaccttgcatgcccatcatggtgagacttgcttggcacgacgctggaac

SEQ ID NO: 2577 - DNA, 366 bp, Cyanidium caldarium
  Clone ID: LIB190-052-Q1-E1-C1
cggctcgagccacgcgtaggcggacgcgtgggttgaggaggaagaactgtggaacttgtcgttgtctggcagcgccactgttgttgcgaagacactcgtcgctccaatagatacggcaaagattttgtggcagggtgaggcagttactcctttgccctgcggggcggcgcggtagaactggtttggaggctcttaaaagtaagcggactattgagagggggtgagaggagtgacgttgaaggaggggttccaatagaacagggattctgggcagattggagaggaaatggagtgaatctactgagaacgataccagggtctggcttcaagttgttcatctacgaatactttaaagattaattcttc

SEQ ID NO: 2578 - DNA, 179 bp, Cyanidium caldarium
  Clone ID: LIB190-052-Q1-E1-C12
cggacgcgtgggcgtattcgcgcaatgagaggcaacgtgactatgaagacagaccctttttgaagttggtgaaaccacttcgtgaccgtcctatcagttttatttccccaaatgatgaaaatagcaggattcctcattagttggatagtacaataaatagttgttgagctttatgttgg

SEQ ID NO: 2579 - DNA, 415 bp, Cyanidium caldarium
  unsure at all n locations
  Clone ID: LIB190-052-Q1-E1-C4
agataatggcagttaggcaatgtttgcttattttcatatgtctttcagctctgttaggttcaactttggctgcttctggtgcaacgtctatttagtcgttgcttcagactaaaagagacgagacttttacagtccaaagcagagagctggctaatctaacagacgtatacaacagcagtgtattggactttaccttccgtgcgtgcaatgacactgcttgggaagaatccagagccaatgtcactggtgcacttagtgcagcaaaacaaaacgtaacaggagcaatagcgtttctagaacgcttgatagcagcaagcacagtgaataaaacggtggagtttagtaagctctctagtggtacgaaggaggttgtttcgctggcaggtttaccgcttaatttcacganaaattctac

SEQ ID NO: 2580 - DNA, 414 bp, Cyanidium caldarium
  unsure at all n locations
  Clone ID: LIB190-052-Q1-E1-C6
ggccttgtgcaagtcaacaaacatagaaaagtaaagagattgcaagaagataatattttgaatagagcactatcacaaccaggagatgtatttctgtgcttttgcaacatccagttgttggtgaatgcagaaagagcgagtatgaggaaatattacttgtccagaaagtatcgaattgtgtcgtctattagctggacatagagcggtttggttcgatgaagatttggatgactttcgtttggaagctatcttgggagcactattgtgtacttgttattgtgagtggaagcgttttgaaggagaattgggggtacaagaatggaatgaattggagaagatatcttccttagatacttggaagcttgtgcttggtacaagacanagagtggataatatgttacagcgagtacacaa

SEQ ID NO: 2581 - DNA, 415 bp, Cyanidium caldarium
  Clone ID: LIB190-052-Q1-E1-C8
acccctttgtctttcggtagagagtgacaaggggttgcgctaccaagacggcatgtctatgcgctcgggcgacacaaaacgagaataacgagggcaaaagacggaatgccattcgatagagagtaaacatgcgtgacactgggaatgcaacaaccgctggttcgtcttttgcatagccagccggtcgtgtcgttgtctcgggcgagttagctccggtgtagcaaggctaccaagccttcttgcaatcgttcaggctttatgtcgattgatagttcaagtgtattttggaaaaagagtaatacaaggacgacttggcttgcatcttctcgtttccttcttgggttgctagtgctgtaagtgctcagggaaacctacagtgaaaccgaaacaatcgagcgaggttttgctatgacag

SEQ ID NO: 2582 - DNA, 339 bp, Cyanidium caldarium
  Clone ID: LIB190-052-Q1-E1-C9
cccacgcgtccgtctttttcttgttggcttggtccgacttgcaaagaggatgatgaaacgagacaagatcaagtcttggtatctttcccagtcttatccagtggcggtacaaaatagaatcaccgaatgtcttgctttattacaaaatcaacccaacaatattccttgctatatccaacaatatggaatacccgaagttgctggtttgcgtgctttgatatggaactgttgcattgaaaaattctttgcggtcgattctactacctctttgcacgttgcttgttcatcgtattgggaatcgatcgcacaatatcagcaacatccaaccgacgacccact

SEQ ID NO: 2583 - DNA, 430 bp, Cyanidium caldarium
  Clone ID: LIB190-052-Q1-E1-D10
cccacgcgtccgagtctgctctggttcgagttttgaggagaaggaacgttgcaagtcaaagcaacccattctcgatatgctcttggaaaattcggcaggtctgcatcaaaatgttttccgtgacttttctatgtggaaaagaaaagaaaggacattatatctcaaagatgatctaccagtgatggattacaaattcatcttgatgagttgggggtcaacgatccatatgaaatgaagtctcaattatggaaatgacttgccaggttaatttcttagcattcatttggcttccttatactggaaaactccgatggaaagtttgtggataaattcagtaaaaagtataacagcagaatactctaatgggaaacatttgtcgaaatttgcgttttgtgaaaaaataactggaagtttcaaaggaaccgctgca

SEQ ID NO: 2584 - DNA, 404 bp, Cyanidium caldarium
  Clone ID: LIB190-052-Q1-E1-D11
cacatttggcgggattccgagagagtgcatgttgttataacaaacgtttgctgttgacaagacttttacgtttttatccttttcaatgtctgcagtggaagtcttacaagtaaatgttctaaataaccctggtttctttcgagacccgttttgttttgaaataacttatgaagtgagagaagcgttacaacaagatattgagtggaaagtaatttatgtgagttgtgccaaagacgagagtttggaccaagttttggatgaagtacttcttccagcagatacggtgggtcgttttcagtttactttggaggtctcagcacccaatccagacaaaatacctagtgatgacttattgggtattacggcagtattgatcacttgttcctacaaagatcaagaattca

SEQ ID NO: 2585 - DNA, 416 bp, Cyanidium caldarium
  Clone ID: LIB190-052-Q1-E1-D12
cccacgcgtccgaagtttcttggtctaggcagtctcgtatctgagcgtcgccatgacaatgaaaatacacttttggcgacagaattcacctttcagtattctcagagcaggcaaaacaccctttttagtacaatatccatgctgcagagttcgaatgtaataagaaaaatcgctcattttggcgcctgatcgaggcttgccatacgcatttcctcatcgctggaatggaacatttcgagttattttactatggtgagaagaaggtcgtctcagtggcgacatttgtcttcaaaataattttttgcgagaaaggaaaataacgtgagagtataagtacggccaagaagaggcatttcaaatgaaaactaagatggaataatacgtttactagtttcgagttctgtcagggaaaaatg

SEQ ID NO: 2586 - DNA, 523 bp, Cyanidium caldarium
  Clone ID: LIB190-052-Q1-E1-D5
gggggggggggggggggggggcgggggggggggggggagggggggggggggtcgaagtctggcgccgggatgggtaggacttccggcggcgacccacgcgtacgaagtgggaataatagcatggatgagtataggatcattgggagtatatggagtaataataggaggatggggaagcagttcgcagtacagcataatgggaggttgaggaggtggagcggagatggtatcgtatgagggagggggtggagagatctctagagaaaggcaagaaagaaaagaaaggaagacacgcggggggggcggggagaaatcatatgggagtgaaacggattacgaacccgtgtagtcgaggcagtagaagaaagaatgagtaagaaaaaagggagtcattccaccaggggagtaaaggcgcaagaaagaaacccaaagcaattgacgggaatcggaaaaacgggtggatcacgtaaattaatccgatttacaccgagaaccttacctctccaagaaggtgttgcacggc

SEQ ID NO: 2587 - DNA, 416 bp, Cyanidium caldarium
  Clone ID: LIB190-052-Q1-E1-D6
gtactcctcgaaagctatataagtagcgtatgcaggaaagaataaggtaaaggaagagaaggaagaagcagagagggactatgagcgagaaggtggatagtcgagagggaaaaagcgcagaagccaagataaggtatcgaggtgaggaaagaaggaaaaggagaagaagagagggtaggcttagaagcagcacgcgagagaggagggcgttaaagcatgggaggaaagaaatccgaaaaagaagagaaagaggtaagaaagaggaccgaatcagggtaagaggtagaggagcaagaagagaagagagaatgctgggtggagtagcgaaacaagagaagggaagtaaaaggtaagaaagaggaaaggtttacgagagaaggaagtagaaagaagagagtgtaaggcggcgtcataat

SEQ ID NO: 2588 - DNA, 421 bp, Cyanidium caldarium
  unsure at all n locations
  Clone ID: LIB190-052-Q1-E1-D8
aacaaacttgtggaggcagatgccatcatatttggatttcctacacgctttggtatgatgtgtgctcaaatgaaggctatgtttgactctcttggacatttgtggcaaagcggtcagctggttgggaaacttgcgggtatctttgtatccaccggtactcaaggaggtggacaagaaacgactgctttaactgccagtaggcagttggcacacttgggaaggattttcgttccgacaggttggaatatattgggaataacttttcatgttttgtgaatattggataggatattcttatggcagtgatatgtttggtttaaaggagcctcagggaggttctgcttatggtgcaggtacctttgcangtgcagatggaagtcgacaaccttccgaatacgagttggctagagcaaaacatcaa

SEQ ID NO: 2589 - DNA, 362 bp, Cyanidium caldarium
  Clone ID: LIB190-052-Q1-E1-D9
gggaaaccaaagacatttgggttgcaaatgttggaggaaaaccacaaagcgttttactcattgaaaagtttgtcagtttaatggaaaaggaaaaggaagaacgggagaaatgggcgatggaagcatggaaaacgcaattaattgtcgatgctatttatcaatccgcaaaaaccaagcaagtagttgtcatgaaatattagttttctttgtagtatttctaaagatttccatgtttgtatcgtatatgattactgagatgtaaacgaggaggaagtcagtgtttgttgaagaaagctttggctatacaactgggaacgatgacttgtgcaataaatgtcacacaaatgtgacgtttttgtacg

SEQ ID NO: 2590 - DNA, 380 bp, Cyanidium caldarium
  Clone ID: LIB190-052-Q1-E1-E11
cccacgcgtccggtcgtagtggtaaatgaacaccgagagcaaaactgtcaaacttgtgagtagtgataatgaagtttttgaagtagacacaagcattgtatccctttctgaaacaataaaaaacgtcttggaagacacggaggatacagagagcattcccttgcctaatgtggaaggacgaattcttgcaaaggttatcgagtattgtagatatcactcactcttaaagaccattccgcagtctgaggaggatattgagcgctgggatagggaattcctaaatgtagatcaaccaaccctttttcatttgattctggctgcaaactatttggatatcaagagcttgttggatttaacttgtaaacgagtagcagatatga

SEQ ID NO: 2591 - DNA, 377 bp, Cyanidium caldarium
  Clone ID: LIB190-052-Q1-E1-E12
cccacgcgtccgcccacgcgtccgcaagttcctatgatactctttatatctcaaggctctcattacttggaaaggatggcagatgttggttttgatattatttctgtggattggacggtggatattggcaaggcgagagaacgcatgggttcttcttctggtattcaaggcaatttagatcccgctattttgttagggacacctcaactcattgaagagcgcacgcgtgagattattcataaagctggacctcgtggtcatattatgaatttgggacacggcgtattacccaacacaccagaagaaaatgtagccaaattctttcaaacggtgcaacaatttcgttggcaagaataaatttactctattagctgccg

SEQ ID NO: 2592 - DNA, 422 bp, Cyanidium caldarium
  Clone ID: LIB190-052-Q1-E1-E2
cccacgcgtccgttgtttttcgtaaaagttttcattcagcatggctcctaaaggtgctaaaagtgtacccgttgcaggtaaaaagccggtggcaaaagttgaaaggaagacgtcgagaagaagagatcggagacgtattccagggagagatacaaggttctgaagcaagttcatcctgacaccggaatatccgcaaagggtatgagcggcatgaattccttggggagtgatatttttgagagaattgcgtcagaagctagcaaattagctgcttattcgaaaagcaagacgcttacttcgagagaggtacaaactgccgttcgtcttttgttaccaggagaacttgcaaaacacgctgtatcggaaagtacaaaagcagtaacaaaatacacttcttcttaacggtacaacaagtgctcaaa

SEQ ID NO: 2593 - DNA, 411 bp, Cyanidium caldarium
  Clone ID: LIB190-052-Q1-E1-E3
ccattttcctctgtcgtggataggcgatgacttggttaagattgttgcttacgaggcaactggcagggaaatgtggaaatataacactagttggtagtcttccatccattcgatcggtctctagtgttcttccttcatgtgactagtccttcgcaagtaacattcaaaggagatccttctcggctgttccttcggaggaaagggcaaataaacaagggggagaagctaatgttacacaagatacttccaaaagtacttctccaactgttttgcaggatacttatggctttgaattaagaacaggccgagcggacaggatgccttcttcgtttgagcaagccacgggaagtgaacgagcagaattggaagatcccgatatctatcgtaatcctgaaaagtttgtcaacagca

SEQ ID NO: 2594 - DNA, 413 bp, Cyanidium caldarium
  Clone ID: LIB190-052-Q1-E1-E5
cacacattcatgtttgcctttcagtacagcttatgttccagttctatttatctaaggagagttgcatggaagagtatcaattatcatggttaccctcgagtgtgcgtgcctaaggagtagggtaatctttccaagggggtaggtcaagtgctgccgatagtagcagtgcaaaggaaggtgtcaagaatatcgggggggcggagcaacgaaaaaggtggcgaaatatatcactcagttgaagaaaatgtaaagaagggagcagaaaaagtatcagaaaaggttgatgaattcaaagacgctgtgcaggatagaatggaaaatgcagatacttccaaagcaaaagacgtagcaagagatgttgtagataaggtcaaagatgctggacaatccgtaaaggacggtgtctctgatgc

SEQ ID NO: 2595 - DNA, 410 bp, Cyanidium caldarium
  Clone ID: LIB190-052-Q1-E1-E6
aagaggtgtatgatgcaggcaaagaagtgacgcagtagatcagagagtaacacatgcaagtaggtaaagcgaacgggtgagtaaagaggtgggaaagagtggaagagcatgaaagcacaggagaatgtaagaaatggtgagagtggaaaccataaaggaagtaaaagcgggaatctgagaggaggaaagccacattgggacggaggaaaaggtccaaacgggagaagtcagcagtggggaaaattgggcaatgtacagggaagtatgacccagtaatgaggagtggagtaaacagaaaaggaagtaaaaggagggaatgaacggaagttatggcaaaaacacgtgccagcagcagcggtaaaacgtgtgtagcaggcgtagagcagaagaactgggtgtaaaggtcgagt

SEQ ID NO: 2596 - DNA, 384 bp, Cyanidium caldarium
  Clone ID: LIB190-052-Q1-E1-E8
ggcgctggtggttggtttgggctattgtgtccctcactacgaggtttggttttctgttgtggtgaagactttgtttagcaacttgtgtgtgaaaaatggtcaacttgttggagacggatgagggacgaaacctgttggcgggcgggcaactcattttatatgttgctatgttggctttctccgccactattgtgggggggagggggaatcccatgggggggctctatctaattgccaatgaatatagacacccggatcctagcgaaccttttgtacccattgacaaagtgaagaacgtcactttctacaagtctctttccttctgtgcctggggtgtcacaggagatcgtacgcgtggcatgcattccacttgccgatgggtca

SEQ ID NO: 2597 - DNA, 379 bp, Cyanidium caldarium
  Clone ID: LIB190-052-Q1-E1-E9
gcaagtttccagatacaaagaagaaaattctatgctccgagaagccttggatcgttttcgttcgagcaggagtttatgtggtgcggagacaaggacgagtgtatgttatccagagtctgaagaagattcatcgtcaaaagtgcaagagaggagaaagcggcggcggaggaaaggggaggatattagcagtccgaagaggcaagagagtgagtcacggcggagtgaggagtccgaaagagaggaacgagagcaatgtaacgaagaagaaaattatttctatcacaaacttgattctctttatttgaagtctaatcggcagaataatgtgacaacaaatcctgcagagtttgtttcccttgtcaaagatatgacagagcct

SEQ ID NO: 2598 - DNA, 388 bp, Cyanidium caldarium
  Clone ID: LIB190-052-Q1-E1-F10
cggtggatttccaggcttcgatggagagtcacccataacgttttacgatatttgttgtggaatccgagagacgatagatttgctttttcctgcggatcaagtgcaagtcatagcagagcctgggcgttattttgtttcatccgcctttactttggctacgaggattattgcccgtcggtttcgaacccaatcacaggaaggagacggcagttgtctgaaggcaggcttttgtttgcaagaagatatttctcgttcgagtcttgttgctgattactatgttgatgatggtgtttatggttcgtttcgagatgtgatatctttgggtgtggtattctatcccaaaacgtttagcagctctgacgacactgctattgactatgcacgtttt

SEQ ID NO: 2599 - DNA, 401 bp, Cyanidium caldarium
  Clone ID: LIB190-052-Q1-E1-F11
cccacgcgtccggaacaagttttgagcaaaaatcaaaatttcactgtatgctaattattttaagtaccaagttagcatacaatgttgctgcggagttgaatcaaacaagtcgttgctacactcctggaaacaagctccctcaaggcattgatgttccggaaagatgtgaattggtcattctttgtgaagaagatgttgaaaactttattggcaaaagtatattgtcaggtttaagagaggcctttacgttgacagataatccaagtttgaaggttattgagaatcccgtcctgaaagacatggtgttgtctttggaccaaatgagtctgaaaaggttgtcgtgagttggaatttattgttagttgttattggatagttttatgatatttatataaagaatc

SEQ ID NO: 2600 - DNA, 357 bp, Cyanidium caldarium
  Clone ID: LIB190-052-Q1-E1-F12
cccacgcgtccgggtcgagtagtagagtaagtgtaaaagggaaaggaaaggagagaaagaggaaagggatgaaatgcagagatctctagagaaaggcaagaaagaaaagaaaggaagacacagtaaatgaggcgagaaagcataggaagtgaaacggattaggaacccgtgtagtctatgcagtaaaagaaagaatgagtaagaaaaaagggagtcattccaccaggggagtaaaggcgcaagaaagaaacccaaagcaattgacgggaatcggaaaaaggggtggatcacgtaaattaatccgatgtaaaccgagaaccttacctctccaagaaggtgttgcacggctgtcgaaag

SEQ ID NO: 2601 - DNA, 350 bp, Cyanidium caldarium
  Clone ID: LIB190-052-Q1-E1-F2
agcccacgcgtccgcatttttctttgggagaaaacgacgtcgtcgactcaggggaccgaagaagacttcgaaagtagcacctcctcctgaagctctggtgaaaaaagaaaaaaagggagaggggggaggggggaaaaaccctcttttctgggggggaggcaagaactttggtattggtggagatgtacaaccaaagagagatgtgactgcgggggcgggggttatcgcaggggggtgcgtcttcaaagacaacgaaaggttctcatgtcgagactcaaggtgccacctgcgatccaccagtttacgcataccttggataaaaacgtttccaaacagctattccgcttgtt

SEQ ID NO: 2602 - DNA, 426 bp, Cyanidium caldarium
  Clone ID: LIB190-052-Q1-E1-F4
gattactagttctgcatttgagccttcgaatatgatggccaaatgcgatccaagacacggaaaatatatggcttgctgtttaatgtaccgtggtgacgtcgttcccaaggacgtgaacgcagctgtggcttccatcaagacgaagcgtgcgattcaatttgtagactggtgtccaacaggattcaagtgcggtatcaactagcgggcgcggtctgtgattcctggagcgcggaattggctaaagttcaacgtgcagtcggcatgatttccaacagcactgccatctctgaagtctttgccagaattgatcacaagtttgatcttatgtatgcaaagagagcatttgttcattggtacgttggagaaggtatggaagaacgtgaactttccaaagcacgtcaggatcttgccgctctccataaggat

SEQ ID NO: 2603 - DNA, 414 bp, Cyanidium caldarium
  Clone ID: LIB190-052-Q1-E1-F5
cggacgcgtgggcggacgcgtgggacaagccagggtagtggatatgattcaaagttttgttactagtttctattcttttcaagattcgaaacaacttccatcggaagtgtgaagtcgttttgaagcagttgattgtgtggtgtagccaactggagtggcaaggaaatggagagcagcatgatcagctcgggggaggaggggcgtcagttgtgggagtgtctactagaatctcaaactcactatgcacaaatgatggaagaattgattcctttattgattgctctcacgcaacgtactacggaatacgtgagtcactatgttgtgttgataagaaactatattcacttgggaggtcgccattttgtggtaacttatggaaattggttgtgttcctttttatattcattgcttggt

SEQ ID NO: 2604 - DNA, 317 bp, Cyanidium caldarium
  Clone ID: LIB190-052-Q1-E1-F8
cccacgcgtccgcccacgcgtccggctaaacgttgcctttgtcgtatgtcctctagcgaatatagtgattccctttgtcaacaaagatacttgtttgctttggtctgtgaatgtgttcctgatcgttagtctttatgcggagcggaggttttggtgaaagacgcgccagtcgccatgagaattcgtggcatttggaggggggcgcggcgtgcaacggaaggaggagggtcaagttttgaacaagtaaaaggtttttggattggggtagttggaagtaggcaaaggagaaaataaaagaaagcaacgtctttttagct

SEQ ID NO: 2605 - DNA, 344 bp, Cyanidium caldarium
  Clone ID: LIB190-052-Q1-E1-G10
ggtcaaaaagcgtcttttttttttctctggagcaaatgtcgtttcgattgtgaatccaaacatttggtggcctcttatttgtccttgtttctccaaagatttttttttcgccctagaaaactttaacggatcatgttggaggctccagttgaagaaaagatactttgtggtagacagcgatattgcctcagattgtagaaagtattgcactggtttatacagagataaccacgtcttagtgacactgaatttataccgtccgctgtctgagagtcgtttgttcctagtattgcatttttcttttgttttcttgaaataaaaatttggcgccaatttgtactggc

SEQ ID NO: 2606 - DNA, 421 bp, Cyanidium caldarium
  Clone ID: LIB190-052-Q1-E1-G2
cccacgcgtccgcggacgcgtgggtgcaggcaaagaagtgacgcagtagatcagagagtaacacatgcaagtaggtaaagcgaacgggtgagtaaagaggtgtgaaagagtggaagagcatgagggcgcagaagaatgtaagaaggggggagagtaaaaaccataaaggaagtaaaagcgggaatctgagaggaggaaagccagagggggggggataaaaggtccaggggaggagaagtcagcagtggggaaaattgggcaatgtacagggaagtatgacccagtaatgaggagtggagtaaacagaaaaggaagtaaaaggagggaatgaagggaagttatggcaaaaacacgtgccagcagcagcgggtaaacgtgtgtagcaagcgtaaagcagaagaactgggtgtaaaggtcgagt

SEQ ID NO: 2607 - DNA, 416 bp, Cyanidium caldarium
  Clone ID: LIB190-052-Q1-E1-G3
cggctcgtgagatgctactccacaaggtaaagaacccttcgagagtggactttgtccatgtcgatgttatggaaaaatctgtactttctagcgtattaaaggatgctgaggtggttttcttcggtgcttcagcttctgcagggtggagagtccctggtacttctaagaacaccccgaaacaggtggactacttgggggggatgcgggtcgcacaagcggcggggcaagctaaggttaaacgtctcatcttggtaagctcagcaatggtgactaaccgaagttcattcccttatttgttcttgaactctgcatttggacgaattatgcattggaaaatgcaaggagaaattggagtcatcaaagttcatgagaaaaatccagaaatggcttatactattgttcgcccaggacacctg

SEQ ID NO: 2608 - DNA, 413 bp, Cyanidium caldarium
  Clone ID: LIB190-052-Q1-E1-G7
cccacgcgtccgcccacgcgtccggtcgtgtacgagggttggtcatttgttgagctgaagagtcaatgaacaagcttcagttgctatgcgtaaccaaacaacctgtttcaagagcatggcaaagagaacagaaggggttagactccgagaagaaatcagttgcagaaggaactttgggaagcaggtggaaggggagggagactgcacaagagagcgcgtactttaatcgtgaagatgagcaggcagtacaaaggttagcagcgaaacttcggcagcaaattgagccatcggaggaagtactcgcccaacagagaaaaggcgtggcagaaatcttacaaaagcacggtgtccagcctaatcaaagtttgattgaagatattgtccgtatctttcattaattcctccgtgtttga

SEQ ID NO: 2609 - DNA, 375 bp, Cyanidium caldarium
  Clone ID: LIB190-052-Q1-E1-G9
cccacgcgtccgcccacgcgtccggaaaagagaagagagctagaaaggaggtaaaagaagagtaaaaggactagaagaggtacggaattcacgaggaaggagcgtgaaggaaggaggaatcccaagtaatcgaggaagaaaaagcttcggtgaaagcgtgaacggattttgtacacactgcccgtcaagttctggaagtgtgctaggagtggagtaaacagaaaaggaagtaaaaggagggaatgaagggaagttatggcaaaaacacgtgccagcagcagcggtaaaacgtgtgtagcaagcgtagagcagaagaactgggtgtaaaggtcgagtagtagagtaagtgtaaaagggaaaggaaaggagagaaag

SEQ ID NO: 2610 - DNA, 414 bp, Cyanidium caldarium
  Clone ID: LIB190-052-Q1-E1-H1
agacgatgatgtatttgctcccaccaatgaatacgtcattggaactgccaatatgttacgcttagtgtttcaagatatttatcctgtgaacatgcgcaaggaagaagatgaaggaactttgtttgggagatttccagatgagagttatgatggctatactagtaacgttccaggaaatccgtggattctatgtactttaggaatggggcaatattattatgaggttggagcagagtggttgaaacatgaggagattgtcataggaaagtggagcaaagactttttcagacatttgagggttatgcctcctccttctcctcctcaatcttctatatcaacgaccattactggaaaagcgatttgtagttatgtttctgcgctattagaagaaggagatcgcgtattgaatgctat

SEQ ID NO: 2611 - DNA, 365 bp, Cyanidium caldarium
  Clone ID: LIB190-052-Q1-E1-H10
tgattcttcttcttctggttcttctggttctgagagtgacgatagctttgattcgtcatcagatgaggatagctcggatgatgagtactatagttatgatgaagatatttctgattatgattcggaagaagaagttgatgacttgttttcagaagaagacacggattcagaagaagaaggttccagtgactcggatgacgtgtaaaagagtgtacagtgcagcaatggaacaaaagttgtttcgcaacagtgtatagacagaaatagatagatgtagaaaggaaaacacgcaactattattatctattcttttcaccaaggaacaaccgtttgctcgtccttgtgggcgtatatatgtctataga

SEQ ID NO: 2612 - DNA, 395 bp, Cyanidium caldarium
  Clone ID: LIB190-052-Q1-E1-H11
tgccctagttgccattactttgggaccacgtggagctttcctttctactcattccaatccttccgtcatagaaaagaatatcgcttgttttccttgtttgtcgccaggaaaggccgtctttcgacccaattttcaggcgaaaggcactatcaacgcagttggagcaggagacacatttacagcaggtatattagctatgcttctaagacaagcacattcttcatctttcctatctttggaattgttggcagatgttggattggctgctgctatgcaaagaattgactctggagtcgaaccaaaaacactgcaaaaacttgttatgcaactcgatgagatgccccgtgcttctgttcagtccctttgatcatttgtaataaatcttccaacgcaac

SEQ ID NO: 2613 - DNA, 331 bp, Cyanidium caldarium
  unsure at all n locations
  Clone ID: LIB190-052-Q1-E1-H12
cccacgcgtccgcgaagtattcaatcctccaaagaagcctatgacggatgatatcacaggagagcctcttgtgaagcgttctgatgataatccagaaactttaaagaagagattagaagcatttcataaaagtacggatcctgtgattcgttattatgagaagaaaggtattttatgtcgaatagatgcttctaaagatatcgatcaagtatctcaacaagtggagcaagctattgaagaacgacaaaagactgccaatgcagcctgaaagttgttttgcaagtaaaaagtgttgttgtttttttgtgcgtttaanaaaaaannnnnnana

SEQ ID NO: 2614 - DNA, 364 bp, Cyanidium caldarium
  Clone ID: LIB190-052-Q1-E1-H2
ggtgtatgatgcaggcaaagaagtgacgcagtagatcagagagtaacacatgcaagtacgtaaagcgaacgggtgagtaaagaggtgtgaaagagtggaggaacatgaaagcacagaagaatgtgggagatggttagagtaaaaaccagggggggaagtaaaagcgggaatctgagaggaggaaagccacattggcactgagaaaggggcagcgggatagaagtcagggggggggaaaattgggcaatgtacagggaagtatgacccagtaatgacgagtggagtatccagcaaatgaagtataaggagggaatgactggaagttatggcacaaacacgtgccagcagcagcggtaaaacgtgt

SEQ ID NO: 2615 - DNA, 412 bp, Cyanidium caldarium
  Clone ID: LIB190-052-Q1-E1-H3
atttgaaacgcgtgtttggttttttactttgtacttgattcttgtaaaacatgtctgacgatattgttgccttggttattgacaatggctctggtatggtgaaagcaggagttgcaggggacgatgctcctcgttccatggtggcgtcgatcgtaggtcgaccaagacaccaagctattatggttggtatgggagggagaggggagttatgtgggtgatgaggctcagtctcgaaggggtatactctctttaaaatacccaatagaacacggtattgtcactaattgggatgatatggaaaagatatggcaccatactttctacaatgaacttcgaattgcacctgaagagcatccagtcttgttgaccgaagctcctctcaatccagaggcaaacagggagaaaatgactc

SEQ ID NO: 2616 - DNA, 433 bp, Cyanidium caldarium
  unsure at all n locations
  Clone ID: LIB190-052-Q1-E1-H4
cccacgcgtccggagacattggttgcttggcatgagtgagttgaggttggacggagacactcgtgagttggtacgacaggctgcggagtacatcgttcggaaagaatataaagtttccgatatagttcgaaaacgtctgtatgaagaagacacgaggtttgcctttctttctccaaagcggtcgcaccacgaagaaatagtaggagaactgggagaaacagtacagagactgggagccaaaagaaagcataaaacacaacacacctcagcgaaaagatatagaaaaactacagaaacggaagattatggagacagactgtccacagtttctatgggtaccttggcctcatatatgaaccgccacaaggaaagagtgccttatcaggtacttgatatggangaaatactccacgcaacacctttatctcccgtc

SEQ ID NO: 2617 - DNA, 370 bp, Cyanidium caldarium
  Clone ID: LIB190-052-Q1-E1-H7
agtgactgtcttcctattccattttccatacaatactctaattgtccgtaaggtttcaatattattacaagtaaacatgagttgttcaaagtaaaaaaaaagggcgagagaggaagaaaaaaaaaagaataatggcggggagggttcagacacaaaataacttcaaaagaaaaataaaaagttctccaagcgggggaggagggagtcaagccaaggaggggacaactagggccgtcctgccagggaaggcactcgaatttaccctgcatagcccttttaaaacccatctacctttcgccaatgtgcataatacggaatcagtttgaaaaactcaccgttgggaaaagattcaccttcccaaaacttatcc

SEQ ID NO: 2618 - DNA, 341 bp, Cyanidium caldarium
  Clone ID: LIB190-052-Q1-E1-H8
cccacgcgtccgcccacgcgtccggcagaatggacgacaggcttccacgtttcaaaagaactttccacagagtgctttataagaaaagaaaggaggacacagtaaatgaggcgagaaagcataggaagtgaaacggattaggaacccgtgtagtctatgcagtaaaagaaagaatgagtaagaaaaaagggagtcattccagcaggggagtaaaggcgcaagagggagacccaaagcaattgacgggaatcggaaaaaggtaagaaagaggaccgaatcagggtaagaggtagaggagcaagaagagaagagagaatgctgggtggagtagcgaaacaaga

SEQ ID NO: 2619 - DNA, 246 bp, Cyanidium caldarium
  Clone ID: LIB190-052-Q1-E1-H9
ggagtgagtgtgcagaggactcgagccaatcgattggaatcctattggcaatgactttgtcgtggagttgagttctggtacggtgttggatcaagtttctttggaagacagagaatattatgattatgatgaaaaggaaaaggaacaagtcgctattaccggtttagaatggcaatggaagagagtataaatttccaaacaacaacaataataaaaaatatagtcatagaaattgttttccacaat

SEQ ID NO: 2620 - DNA, 392 bp, Cyanidium caldarium
  Clone ID: LIB190-052-Q1-E2-A10
agcccacgcgtccgcccacgcgtccgatcgtcttccacgcggaagtaatatgatcgatcgaacagcattgcgcaatgttggaatgcagtatgtaacaaccgcggatgatattggacatcgcttggtcgtagagatccaactaaaggaatccagcaaatataatagtcacatgaaggaaggagaacgaccaaatgcggttacagatatcatttctacggaccctgaaatggataggaaagtatctcagtgggtgtcggaaggacaaaaggcattcttagtagaagatgagttgacgggtgaacgtcgaggaatattcttaagctcaaccaaattgaaagttcagaaacaagccagtcaggaccgaaatagcaatcatggagtaaatactagca

SEQ ID NO: 2621 - DNA, 334 bp, Cyanidium caldarium
  Clone ID: LIB190-052-Q1-E2-A12
cggacgcgtgggtggggttatcaggttgtcctccaccatcaactacatctcgaagaatagtactgttcatcagtcaagtaagggcaaagtctcctgataacaacagcagccactgtttgcacactttactttcgacagtacactcgattgacttgactcgatgcaaattggcatggtgtgtctgacgcttgacgctcgagatatgtgctctcgatacagaatcatatggacaaggccattgcgctttgatagtgaagaacgttacaatggcgaatggaatttggagttgaagaaatgatgaacactctacctgctccagtgatagatgaacgtg

SEQ ID NO: 2622 - DNA, 252 bp, Cyanidium caldarium
  Clone ID: LIB190-052-Q1-E2-A2
ctcactgacatcgtatccgcggttcaacactagagacgaacagcaccgactgtttaacacaaacacagcattctgccgaattgtagaaaatgctcgagtatcgagtgtgcggcctgccaaatactaccgaggaacgaggtgtagcatgcaggcaaagaagtgacgcactcgatcacagactaacacatgcaactaggtacagcgaacggctgagtaccgaggtgtgaaagactggaagaacatgcaaccaca

SEQ ID NO: 2623 - DNA, 403 bp, Cyanidium caldarium
  Clone ID: LIB190-052-Q1-E2-A3
ggtcaggaattccagtcacgcgtcagatgcaagcggcccttgatgggatattatgctttggcaaataccaaacagcctttattcgaaagtccaacaaagcaatttgacttgtcctcactacaaaagactttcttttgtattggtccggtttgtttaagaagcggctatggattaggtttgggagttggctgtgggctgggctttggtcgtgggtttgctttgatggacctgtctagtcaaggtgtcggtagcaccggtggtattcctacgcagttcttgtatggtttgccttttggacattacgtttctgggtttttgcagaacttagctccaaaatttcctggaagttcaacaggtattggctgtggttttggtttgggctatggcgttggaattggtctac

SEQ ID NO: 2624 - DNA, 343 bp, Cyanidium caldarium
  Clone ID: LIB190-052-Q1-E2-A4
gtccgctgcaagccgcccgtgctgggatattatgcattggaaaataccaatacagcctttattcgactgtccaacagtgcactttgacatgtcctcaccatcacacacgttcagttgtgctggtccggtttgtttaagaacctgctatggattacgtttgggagtttcctgtaggctgcgttttggacatgagtttgctttcttgtgtccatgtcaagtcaaagtgtctgaatcaccagtggtagtcctaccctgttcctgttccgattgccgtttgtgcataaagtcactgcatttttgcaacatttacctccaccttttcctaggagttcaacatgtattg

SEQ ID NO: 2625 - DNA, 406 bp, Cyanidium caldarium
  Clone ID: LIB190-052-Q1-E2-A7
agaagaaaagaagagaaaagccgtactgaagaccgacacaggtactcgaggagaaaggagacccaaattaaggtgagagaatggacgataaggaactaggcaaaaggatatggtatctgcggtagaacatatgaaagaagcagcaccgactgtttagcataaacacagcactctgcagaaaagagaaaatgtaaagtatagagtgtgcggcctgccaaatagtagagaagaaatcgatgaaagtgaaagcgagtaaaagatgaggtatagagaatggcggtcctaacagtaaggatccaaaggtagcgaagtaaatagacgtttgaaaggcgtccagtatgaaaggagaaacgagtgtagcactgtctagtcgtccaactcagcgaaacagcaataactgtgaaaa

SEQ ID NO: 2626 - DNA, 402 bp, Cyanidium caldarium
  Clone ID: LIB190-052-Q1-E2-A8
agagcaattgagctaatgaaactggtggaagaatgactacgttggactacgaatatagttcaactccgtttacagggccaccttctacacttcacactggtacagtaaagctggataatgatgaaatagagcgttatttatctcaactgagaacagcgtcttgcaagccccttgcagaagaggatgtctgtaaactgtgtgatatagcgcgggagctttttattgaagagtccaacgttcatcctgttaattgtccaataactgtttgtggtgatatgcatggacagtttcgctacttgttagcactcgttaaaatacgtggcaactgttcggaatacaactgtcatttcatgggggactatgtaaatagacgatattactctgtggcagcaataactgccc

SEQ ID NO: 2627 - DNA, 384 bp, Cyanidium caldarium
  Clone ID: LIB190-052-Q1-E2-B1
gggtcgagcacgcgtccgggaagaacggaccgagttttacaagtcgatattgctggagtattcttctctgccgttttttcaggagttttgatggtaacaaagttcttttctttagttgtttatttactgtatttagattcctgccttttttgcgttcaatatgttaattccaatagagcatttgaggaacggaagtacttattttttcattgcggtagtaattctttgtttcgtagctattgctgttctggccattctgtatgtaaggtggcttaaaggaaatgaaagaatgcgacttgagttgctgttgggcaaggagaagacagcaacaataacaggaacagtgaatagttagaaacgttgatgttcgtagatattcactac

SEQ ID NO: 2628 - DNA, 394 bp, Cyanidium caldarium
  Clone ID: LIB190-052-Q1-E2-B10
agcccacgcgtccgaacttgacatgcaacaaagtaaccttcgagtagtccaatcttctttggtggcaagctttgtcctcattctaagtataatctgtgccattcatgcagtaacagccgatgaaataacaagtttcgagagaggataccaaacagttgcaccaactcagacgcagcaatgtcaaaagatttgtgtcaccgccacacaaactcaagttcaaagttgtatttaaactcagacacaggctccgttcatgtctcaatgtgtcacagcattgccaactacctgctataaatacgtaacaaaatataagcacgtgtgctgtgagcaagaatacgagcaacagaattatcaacagcagcaggtttgtcaacagtatttgcaactatcgtac

SEQ ID NO: 2629 - DNA, 392 bp, Cyanidium caldarium
  Clone ID: LIB190-052-Q1-E2-B11
agcccacgcgtccgatctagtcaaaacaacaacagatggcagcaaaaaactcgattacttcggaagttgtagattcctctcctagtcctatcgttgcaatagcaatcgtcaactcctcgaatcggcctcttttcactcgaacatatgaacatcctgacttggtgctgcctagcgctagaacaggagaaacgagagaacaacagctacactatttacttttccggtctctagactttattcctggtgaaggaaaaagtgcaagggagatgaccgcagacggctacttgggttgtatcaacccacaagaaccacttcctatattcgcatatgtcaccaatacaagtgtgaagattttattggcattggtatcgcgtacagctaatgatatgaaa

SEQ ID NO: 2630 - DNA, 429 bp, Cyanidium caldarium
  Clone ID: LIB190-052-Q1-E2-B2
cactctattatattggctatcaaatccgagtatcgcctttggcttgggccatcaacggagaaatttatgaagtgcacgtgcgcaattggggaatgtcgtggggtgcaaccattcttttgggttcggcattctcactgagctatacatttaccagacaagtacgagcatttacgagaactggagtatttggattgtatgcaggatttacccgcattttctggtttatccttatcattttactgcctgagacgtatggaagaacgctagaagatattcgacatatattcgatgaaggtttagttggattggcaaaatacaactggagtcaaaccaaaacatggatgaggacgacattaaggaagcagcatgtagcagtcgattctagcagagaatcggatgaacttgcgtcgagcatatcgccaacgaaaa

SEQ ID NO: 2631 - DNA, 408 bp, Cyanidium caldarium
  Clone ID: LIB190-052-Q1-E2-B3
gcgaatgggagaattgagcatctttcgtcgtactttagctgaaaatatatcgatgcgatctgttgaatgcaacagcatttcacatatggaacttgacgtgaagaatgttcctgcattttgcacaacagctggcgattcacttgataatgctgacttgtccaatgcttggaaactattctatgagcattatttgtcaagagacggaatttatttgcatgaagaggaaaactcttatgggcctggggttcatattcgtatatctgatgtcatgcagagttcttcgattacttgtgagggagaatcatcctcggaacaaatatcaaaccctttacagaaacaaaagaccgacttgataggtaattcattgaaatgttttgatgactcatgttgcactgtaagccatgatat

SEQ ID NO: 2632 - DNA, 421 bp, Cyanidium caldarium
  Clone ID: LIB190-052-Q1-E2-B4
agctatttgatgatcatttgacatttcttcaacacaatgaagtgagctccttgttgaatgtgttgtataagctttctactagtgtggtaactattgcatacatggaacgtctccttgtgttgcaacgtattcgatactggttgttggttgccagttgtatgatgggtgtggctttggtatttatgttgatgtttcgacgttctttttgggagcgtgatgagttgtattacaaggccaaatctgtttaaagtcaatgttgctatttgtacttgaaaatctttttttctttttggaatatgctggtactacgttgttgttgttgtatcgagtgacatgtatttcgtctttggacaacacaagacatgtgtttttgagtagtataatacatatgcaagacgggtcgagacacacacatatatac

SEQ ID NO: 2633 - DNA, 425 bp, Cyanidium caldarium
  Clone ID: LIB190-052-Q1-E2-B5
agcccacgcgtccgcccacgcgtccgcaatacattgcgcgtgcaagaacggcaaagacatcgcaaaaagtgaatgagatgctcggctccgtgaatacgagttctgcattggaagcttttgaaaggatgaagtccaaagtggaagaattggaaccaagtgcggaagcaagtgcgggtatgattggctctggaaatgccaatttggaacgacagtttcaggcattggaaggaacttcggtcgatgatgaattggcacaactaaagtcgagtatcgagtcttcttctcgacctaaatcacttccttttcagcaggattccaatatagaagctgagttggaccgaatgaaaagagaacgagattattcttgaactgttcaaggggggcaatgaatagacagtatatatatatatatatataaagggtat

SEQ ID NO: 2634 - DNA, 408 bp, Cyanidium caldarium
  Clone ID: LIB190-052-Q1-E2-B6
caagcgtagagcagaagaactgggtgtaaaggtcgagtagtagagtaagtgtaaaagggaaaggaaaggagagaaagaggaaagggatgaaatgcagagatctctagagaaaggcaagaaagaaaagaaagtaagacacagtaaatgaggcgagaaagcataggaagtgaaacggattaggaacccgtgtagtctatgcagtaaaagaaagaatgagtaagaaaaaagggagtcattccaccaggggagtaaaggcgcaagaaagaaacccaaagcaattgacgggaatcggaaaaaggggtggatcacgtaaattaatccgatataaaccgagaaccttacctctccaagaaggtgttgcacggctgtcgaaagaacgtgctgtgaagtgagagaacgtacgagaaa

SEQ ID NO: 2635 - DNA, 414 bp, Cyanidium caldarium
  Clone ID: LIB190-052-Q1-E2-B7
cccacgcgtccgtttgtggcattgttttgaagaagagaggcccatcctcaccactacgacgagagaagaaaccatgactacgcagttagaaagaggagaataaagcgttccacaacaggaagaagaaaatattcccgaggacgccaaagacttggccacctatgttcaaaacttgttgtctcagatgcagagccgttttcaaaccatggcagactctatactaggcagaattgacgagatgggtagtcgtatagacgaactggagaagagcatcgatgagttgatggaacagactggagtaaatgaaggcgatggaacagagtctggtgaggttactacgacaagtcgtggggagtgaatgcttcggttgtagtacgttggatatcttccagagtatctcgtactatctatcca

SEQ ID NO: 2636 - DNA, 428 bp, Cyanidium caldarium
  Clone ID: LIB190-052-Q1-E2-B8
cccacgcgtccgcccacgcgtccgcccacgcgtccgggaggtgatttccaccaagtcacaaagaatcgtaaaagagaaaatgacgataggttttgtacatccacttggaactagtgttcaatgtaacaaacactacaaaactgctacttgttcttcccagttttattccaagtcttcatcgtttctagggagaaaccatgggggttgcaagtcgtggtctcttgcctatggaagcaaggtggatcggaacaagtacacttacagtcatcctagttccgtaaaacaaggaagaggaccaactatggttgcttcgaaaacagagttggaacaacaagtaagatccagactagtcaagttgtttgagcagacaccttgcatgcccatcatggtgagacttgcttggcacgacgctggaacatatgatgcac

SEQ ID NO: 2637 - DNA, 428 bp, Cyanidium caldarium
  Clone ID: LIB190-052-Q1-E2-C1
cggacacgtgggttgaggaggaagaactgtggaacttgtcgttgtctggcatcgccactgttgttgcgaagacactcgtcgctccaatagatagagcaaagattttgttacaagttcaaccacttactcctttgccctggtatgctcgctatagaactggtttggaggctcttaaaagtaagcggactattgacagagtttatattgctgacgttgaaaaggaattccaagagaacagggattctgggcatattggagaggaaatggagtgaatctactgagaacgataccagggtctggcttcaagttgttcatctacgaatactttaaagatcaattcttccttccaaggaaccaatcctacgatggatttgatttgatattgcgtaaagtaggcgcaggcgtttcggctggtactagcgctgtaa

SEQ ID NO: 2638 - DNA, 181 bp, Cyanidium caldarium
  Clone ID: LIB190-052-Q1-E2-C12
agcggacgcgtgggcgtattcgcgcaatgagaggcaacgtgactatgaagacagaccctttttgaagttggtgaaaccacttcgtgaccgtcctatcagttttatttccccaaatgatgaaaatagcaggattcctcattagttggatagtacaataaatagttgttgagctttatgttgg

SEQ ID NO: 2639 - DNA, 419 bp, Cyanidium caldarium
  unsure at all n locations
  Clone ID: LIB190-052-Q1-E2-C2
cccacgcgtccgaaaaggatatggtatctgcggtagaacatatgaaagaagcagcaccgactgtttagcaaaaacacagcactctgcagaaaagagaaaatgtaaagtatagagtgtgcggcctgccaaatagtagagaagaaatcgatgaaagtgaaagcgagtaaaagatgaggtatagagaatggcggtcctaactgtaaggatccaaaggtagcgaagtaaatagacgtttgaaaggcgtccagtatgaaaggagaaacgagtgtagcactgtctagtcgtccaactcagcgaaacagcaataactgtgaaaatgcagtaaactagcagtaggacggaaagcacccataagtcttgactagataggtttaaggangagagagaatcatgaagtagacgaggtggggtaagagatg

SEQ ID NO: 2640 - DNA, 433 bp, Cyanidium caldarium
  Clone ID: LIB190-052-Q1-E2-C3
agcgactagcgaagttgcagaatttcttcccatcatttctatattcatcatgcgtacggttgtggtcactggagccggaggattcctaagaaagttgctggttgagaaactctccaatgacgaatctattgaaacaatactagcacttgatatgaaggagccactcgaaagcttagggaacttgcctaaaacacagaagaaagtggtagatatcaccgacgaattgcaagttaagaaagctattgaaggatatcaagtccacggggtcgtccacctcgctgctattatgtcaagtttatctgaagccgatataaccagtgcaatgaaaataaatatgatcggtgcgatacatatgacgtgatccgtagcgaacgaggcagcaaatccaagatttgttatctctagttcaattgccgcctttggaaatgttgcc

SEQ ID NO: 2641 - DNA, 404 bp, Cyanidium caldarium
  Clone ID: LIB190-052-Q1-E2-C4
agataatggcagttaggcaatgtttgcttattttcatatgtctttcagctctgttaggttcaactttggctgcttctggtgcaacgtctatttactcgttgcttcagagtaaaagagactatacttttacagtccaaagcatagagctggctaatctaacagacgtatacaacagcagtgtattggactttaccttccttgcttccaatgacactgcttggaaacaatccagagccaatgtcactggtgcacttagtgcagcaaaacaaaacgtaacaggagcaatagcgtttctagaacgcttgatagcagcaagcacagtgaataaaacggtggagtttagtaagctctctagtggtacgaaggaggttgtttcgctggcaggtttaccgcttaatttcacg

SEQ ID NO: 2642 - DNA, 419 bp, Cyanidium caldarium
  Clone ID: LIB190-052-Q1-E2-C5
agcccacgcgtccgcccacgcgtccgcccacgcgtccgaatcatgtccttcgctattcctgctgttgtttctaccggagcagggctatcttttggtgtagctgcttcaattgcaaaggcttggtctgacctggatcatttatgtagtggcagggatagagcgctcttgagtttgccccaagttttcaaaagttccaaggacaagggcaatcttctcgctcgtcaaggacaaggttctattgaagccccaggtaaagctgagagaattgcaagacaaagagcaggaggtatccgtagtgtcgaagatgacgtcgtaccagaggaacccaactttctagcaaaggttcccaaacgggagcgagatgggagagcagcttttcgtccttcaaagaagtcaaacccgttctccctcggagccac

SEQ ID NO: 2643 - DNA, 416 bp, Cyanidium caldarium
  Clone ID: LIB190-052-Q1-E2-C6
agggccttgtgcaagtcaacaaacatagaaaagtacagagattgcaagaagataatattttgaatagagcactatcacaaccaggagatgtatttctgtgcttttgcaacatccagttgttggtgaatgcagaaagagctattataggaaatattacttgtccagaaagtatcgaattgtgtcgtctattagctggacatatagcggtttggttcgatgaacatttggatgactttcgtttggaagctatcttgggagcactattgtgtacttgttattgtgagtggaagcgttttgaacgagaattgggggtacaagaatggaatgaattggagaagatagcttccttagatacttggaagcttgtgcttggtacaagacaaagagtggataatatgttacagcgagttacacag

SEQ ID NO: 2644 - DNA, 426 bp, Cyanidium caldarium
  Clone ID: LIB190-052-Q1-E2-C7
agcatcatgaaagctgctgtctttgcattctttgtcttagcactatgcgccgttgctattcaagcttctcctctagaggacactttgggtgcctttatgcggggtggttatcaatcgcaaagccaagcaccaaaacctagctgttgcaagttgaactgtcattatacccaactttgtgaacaagttatcgtccagactcaacacgtcgtccaaactcagcacgtttaccaaacataccaagtacagcaaacacaacaagtttcgtcagcatactgacgcaatgaggtatccagagggggatatggccaacagtctgtagccccagctcctgcaccttccgtgtcagtgttccagtcaagtgctgtattgactgctcgtcttgctaccaataagtttctcatcacgctcctcagcaagtatctcaac

SEQ ID NO: 2645 - DNA, 435 bp, Cyanidium caldarium
  Clone ID: LIB190-052-Q1-E2-C8
agacccctttgtctttcggtagagagtgacaaggggttgcgctaccaagacggcatgtctatgcgctcgggcgacacagaacgagaataactagggcaaaagacggaatgccattcgataaagagtaaacatgcgtgacactgggaatgcaacaaccgctggttcgtcttttgcatatccagccggtcgtgtcgttgtctcctgcgagttagctccggtataacaaggctaccaagccttcttgcaatcgttcaggctttatgtcgattgatagttcaagtgtattttggaaaaagagtaatacaaggacgacttggcttgcatcttctcgtttccttcgtgggttgctactgctgtaagtgctcagggaatactacagtgaaaccgaaccaatcgagcgaggttttgctatgacagagtgataagaacgtggac

SEQ ID NO: 2646 - DNA, 389 bp, Cyanidium caldarium
  Clone ID: LIB190-052-Q1-E2-C9
agcccacgcgtccgtctttttcttgttggcttggtccgacttgcaaagaggatgatgaaacgagacaagatcaagtcttggtatctttcccagtcttatccagtggcggtacaaaatagaatcaccgaatgtcttgctttattacaaaatcaacccaacaatattccttgctatatccaacaatatggaatacccgaagttgctggtttgcgtgctttgatatggaactgttgcattgaaaaattctttgcggtcgattctactacctctttgcacgttgcttgttcatcgtattgggaatcgatcgcacaatatcagcaacatccaaccgacgacccactactggatagtagtaccaccgagactgtcgtggaccatcctctcaaccc

SEQ ID NO: 2647 - DNA, 356 bp, Cyanidium caldarium
  Clone ID: LIB190-052-Q1-E2-D1
cgcgacgactcgttcaactttcgcaaggcaaactattttctgggcgcttcgagttagtttgtacttgatggttttcatagttactagaattggaagtttgatcaaccgcttttatcagttgacgcatcagggatattcaccctttggtctcatggtgctccatgcagttactcagagtttgcaaggttttctatttggacttacttatatttaccacgaaagagcactaggggaagttgttctattcattcgtcgcaagtggagtcgcagaggggattttcgcgaggattcttttatcgcattagagaaaagaggacttgcccatttttcacaatttgatgaagacgaggaagaag

SEQ ID NO: 2648 - DNA, 395 bp, Cyanidium caldarium
  Clone ID: LIB190-052-Q1-E2-D10
agcccacgcgtccgagtctgctctggttcgagttttgaggagaaggaacgttgcaagtcaaagcaacccattctcgatatgctcttggaaaattcggcaggtctgcatcaaaatgttttccgtgacttttctatgtggaaaagaaaagaaaggacattatatctcaaagatgatctaccagtgatggattacaaattcatcttgatgagttgggggtcaacgatccatatgaaatgaagtctcaattatggaaatgacttgccaggttaatttcttagcattcatttggcttccttatactggaaaactccgatggaaagtttgtggataaattcagtaaaaagtataacagcagaatactctaatgggaaacatttgtcgaaatttgcgttttg

SEQ ID NO: 2649 - DNA, 387 bp, Cyanidium caldarium
  Clone ID: LIB190-052-Q1-E2-D11
agcacatttggcgggattccgagagagtgcatgttgttagaacaaacgtttgctgttgacaagacttttacgtttttatccttttcaatgtctgcagtggaagtcttacaagtaaatgttctaaataaccctggtttctttcgagacccgttttgttttgacataacttatgaagtgagagaagcgttacaacaagatattgagtggaaagtaatttatgtgagttgtgccaaagacgagagtttggaccaagttttggatgaagtacttcttccagcagatacggtgggtcgttttcagtttactttggaggtctcagcacccaatccagacaaaatacctagtgatgacttattgggtattacggcagtattgattacttgttcc

SEQ ID NO: 2650 - DNA, 393 bp, Cyanidium caldarium
  Clone ID: LIB190-052-Q1-E2-D12
agcccacgcgtccgaagtttcttggtctaggcagtctcgtatctgagcgtcgccatgacaatgaaaatacacttttggcgacagaattcacctttcagtattctcagagcaggcaaaacaccctttttagtacaatatccatgctgcagagttcgaatgtaataagaaaaatcgctcattttggcgcctgatcgaggcttgccatacgcatttcctcatcgctggaatggaacatttcgagttattttactatggtgagaagaaggtcgtctcagtggcgacatttgtcttcaaaataattttttgcgagaaaggaaaataacgtgagagtataagtacggccaagaagaggcatttcaaatgaaaactaagatggaataatacgtctactag

SEQ ID NO: 2651 - DNA, 378 bp, Cyanidium caldarium
  Clone ID: LIB190-052-Q1-E2-D7
aggtactcctcgaaagctatataagtagcgtatgcaggaaagaagaaggtaaaggaagagaaggaagaagcagagagggactatgagcgagaaggtggatagtcgagagggaaaaagcccagaagccaagataaggtatcaaagtaaagaaagaaggaaaaggagaagaagagagggtaggcttagaagcagcaaaccagagaggaaagcgttaaagcatgaaagaaaagaaatccgaagaagaagagaaaaaggtaagaaagaggaccgaatcagggtaagaggtagaggagcaagaagagaagagagaatgctgggtggagtagcgaaacaagagaagggaagtaaaacgtaagaaagaggaaaggtttacgagag

SEQ ID NO: 2652 - DNA, 421 bp, Cyanidium caldarium
  Clone ID: LIB190-052-Q1-E2-D8
aaaacaaacttgtggaggcagatgccatcatatttggatttcctacacgctttggtatgatgtgtgctcaaatgaaggctatgtttgactctcttggacatttgtggcaaagcggtcagctggttgggaaacttgcgggtatctttgtatccaccggtactcaaggaggtggacaagaaacgactgctttaactgccattactcagttggcacacttgggaatgattttcgttccgacaggttggaatatattgggaataacttttcatgttttgtgaatattggataggatattcttatggcagtgatatgtttggtttaaaggagcctcagggaggttctgcttatggtgcaggtacctttgcaggtgcagatggaagtcgacaaccttccgaatacgagttggctagagcaaaacatc

SEQ ID NO: 2653 - DNA, 387 bp, Cyanidium caldarium
  Clone ID: LIB190-052-Q1-E2-E11
agcccacgcgtccggtcgtagtggtaaatgaacaccgagagcaaaactgtcaaacttgtgagtagtgataatgaagtttttgaagtagacacaagcattgtatccctttctgaaacaataaaaaacgtcttggaagacacggaggatacagagagcattcccttgcctaatgtggaaggacgaattcttgcaaaggttatcgagtattgtagatatcactcactcttaaagaccattccgcagtctgaggaggatattgagcgctgggatagggaattcctaaatgtagatcaaccaaccctttttcatttgattctggctgcaaactatttggatatcaagagcttgttggatttaacttgtaaacgagtagcagatatgatcaaa

SEQ ID NO: 2654 - DNA, 432 bp, Cyanidium caldarium
  Clone ID: LIB190-052-Q1-E2-E2
cccaagcgtccgttgtttttcgtaaaagttttcattcagcatggctcctaaaggtgctaaaagtgtacccgttgcaggtaaaaagccggtggcaaaagttgaaaggaagaaatcaaagaagaagagatcggagacgtattccatttatatatacaaggttctgaagcaagttcatcctgacaccggaatatccgcaaaggctatgagcatcatgaattcctttgtgaatgatatttttgagagaattgcgtcagaagctagcaaattagctgcttattcgaaaagcaagacgcttacttcgagagaggtacaaactgccgttcgtcttttgttaccaggagaacttgcaaaacacgctgtatcggaaggtacaaaagcagtaacaaaatacacttcttcttaacggtacaacaagtgctcaaaaggtgtttg

SEQ ID NO: 2655 - DNA, 284 bp, Cyanidium caldarium
  Clone ID: LIB190-052-Q1-E2-E4
gaccacgcgtcaggactagttcgagatcgtgaggggatttcggttgggcctaggcgcaatggcaactcgtgtggaaaacttgcgcggtaaggagaccatgaagagaccttgcaaaggggcttttgtggctcctgcctttcaacaatggcttccaaacactttaaaaagaactgcctttagcaaggatgcctgttgtagagtaagcctgaagaagtgtttttcgcgcacaactaccgtttttcaaacgaccagtcactattcaagaactatcattatggcggatt

SEQ ID NO: 2656 - DNA, 420 bp, Cyanidium caldarium
  Clone ID: LIB190-052-Q1-E2-E5
agcacacattcatgtttgcctttcagtacagcttatgttccagttctatttatctaaggagagttgcatggaagagtatcaattatcatggttaccctcgagttatcgtacctaataatagggtaatctttccaagaattatctcaagtgctgccgatagtagcagtgcaaaggaaggtgtcaagaatatcgttgataatatcaaggaaaaaggttctgaaatatatcactcagttgaagaaaatgtaaagaagggagcagaaaaagtatcagaaaaggttgatgaattcaaagacgctgtgcaggatagaatggaaaatgcagatacttccaaagcaaaagacgtagcaagagatgttgtagataaggtcaaagatgctggacaatccgtaaaggagggtgtctctgatggcaaagaag

SEQ ID NO: 2657 - DNA, 163 bp, Cyanidium caldarium
  Clone ID: LIB190-052-Q1-E2-E8
gacccaagcgtcagcccacgcgtctgtccacgcgtcagtacaaccttggcccgacttgtaagtgaccaaggcgtcgaccctggcaccattatcctctatcaccggtactctcatatggggggagaaacacttagagacctcttttcagggctaacctaaagtc

SEQ ID NO: 2658 - DNA, 396 bp, Cyanidium caldarium
  Clone ID: LIB190-052-Q1-E2-F10
agcggtggatttccaggcttcgatggagagtcacccataacgttttacgatatttgttgtggaatccgagagacgatagatttgctttttcctgcggatcaagtgcaagtcatagcagagcctgggcgttattttgtttcatccgcctttactttggctacgaggattattgcccgtcggtttcgaacccaatcacaggaaggagacggcagttgtctgaaggcaggcttttgtttgcaagaagatatttctcgttcgagtcttgttgctgattactatgttgatgatggtgtttatggttcgtttcgagatgtgatatctttgggtgtggtattctatcccaaaacgtttagcagctctgacgacactgctattgactatgcacgttttgttcgt

SEQ ID NO: 2659 - DNA, 352 bp, Cyanidium caldarium
  Clone ID: LIB190-052-Q1-E2-F11
agcccaggcgtccggaacaacttttgagcatcaatcaaaatttcactgtatgctagttatgttaagtaccaagttagcatacaaggttgccgcggagtttaatcacacatgtcgttgctacactcctggaaacaagctccctcaaggcattgatgttccggaaagaagtaaagtggtcatgcttcgtgacgaagatgttgaaagctatagtggtagtcgtatagtgtcaggttgaagagaggcctatacgtcgacagagaatccaggtgcgaaggtcaatgagaatcacgtcctgaaagacatggtgtcgtcattggaccacatgagtctgaaaaggctgtcgtgagttgga

SEQ ID NO: 2660 - DNA, 402 bp, Cyanidium caldarium
  Clone ID: LIB190-052-Q1-E2-F12
ccggctcgacccaagcgtacgcccacgcgtccgggtcgagtagtagagtaagtgtaaaagggaaaggaaaggagagaaagaggaaagggatgaaatgcagagatctctagagaaaggcaagaaagaaaagaaaggaagacacagtaaatgaggcgagaaagcataggaagtgaaacggattacgaacccgtgtagtcgatgcagtaaaagaaagaatgagtaagaaaaaagggagtcattccaccaggggagtaaaggcgcaggagagaaacccaaagcaattgacgggaatcggaaaaaggggtggatcacgtaaattaatccgatgtaaaccgagaaccttacctctccaagaaggtgttgcacggctgtcgaaagaacgtgctgtgaagtgagagaacg

SEQ ID NO: 2661 - DNA, 407 bp, Cyanidium caldarium
  Clone ID: LIB190-052-Q1-E2-F2
cccaagcgtccgcatttttctttgggagaaaacgacgtcgtcgactcatggcacctaagaagacttcgaaagtagcacctcctcctgaagctctggttaaaaaagaaaaaaaggagaaaaagaaagagaaaaaccctcttttcgaaagcagacccaagaactttggtattggtggagatgtacaaccaaagagagatgtctctcgttttgttcgttatcccagatatgttcgtcttcaaagacaacgaaaggttctcatgtcgagactcaaggtgccacctgcgatccaccagtttacgcataccttggataaaaacgtttccaaacagctattccgcttgttaatgaaatatagaccagagtcgaggttggaaaagagaaagcgcctacgtgaaatggcagaagct

SEQ ID NO: 2662 - DNA, 443 bp, Cyanidium caldarium
  Clone ID: LIB190-052-Q1-E2-F3
ggtctagaatagcgggtcgaggcacgcgtccacccacgcgtccgcatttttctttgggagaaaacgacgtcgtcgactcatggcacctaagaagacttcgaaagtagcacctcctcctgaagctctggttaaaaaagaaaaaaaggagaaaaagaaagagaaaaaccctcttttcgaaagcagacccaagaactttggtattggtggagatgtacaaccaaagagagatgtctctcgttttgttcgttatcccagatatgttcgtcttcaaagacaacgaaaggttctcatgtcgagactcaaggtgccacctgcgatccaccagtttacgcataccttggataaaaacgtttccaaacagctattccgcttgttaatgaaatatagaccagagtcgacgttggaaaagagaaagcgcctacgtgaaatggcaaaagctcgag

SEQ ID NO: 2663 - DNA, 425 bp, Cyanidium caldarium
  Clone ID: LIB190-052-Q1-E2-F4
acgcgtcaggattactagttctgcatttgagccttcgaatatgatggccaaatgcgatccaagacacggaaaatatatggcttgctgtttaatgtaccgtggtgacgtcgttcccaaggacgtgaacgcagctgttgcttccatcaagacgaagcgtactattcaatttgtagactggtgtccaacaggattcaagtgcggtatcaactatcaagctccatctgtgattcctgactcagaattggctaaagttcaacgtgcagtctgcatgatttccaacagcactgccatctctgaagtctttgccagaattgatcacaagtttgatcttatgtatgcaaagagagcatttgttcattggtacgttggagaaggtatggaagaaggtgaattttccgaagcacgtgaggatcttgccgctctcg

SEQ ID NO: 2664 - DNA, 346 bp, Cyanidium caldarium
  Clone ID: LIB190-052-Q1-E2-F7
accttgcggcactgacagtcttcagaccacgcgacgcattgtttgaatatctgcccgatccacgtttgacggtaacgatcgtaggctcaaccgatggtctcgaccggttacggggaactagcggtacaataatgaagtgtattggagaagataaccaccatagcaccatggaagcttgtgcttggtacaagacaaaccatggatgatatgttaccgcgaatctgcaagcaggcgagcaacatggccactgaaaacacgtccaaacaaccgaaatcgcactagagaatagcggacgatgtaccaggttgtgagacccagtggagaggagtgcactaggtcgttggag

SEQ ID NO: 2665 - DNA, 376 bp, Cyanidium caldarium
  Clone ID: LIB190-052-Q1-E2-F8
agcccacgcgtccgcccacgcgtccggctaaacgttgcctttgtcgtatgtcctctagcgaatatagtgattccctttgtcaagaaagatacttttttgctttggtctgtgaatgtgttcctgatcgttagtctttatgcttactactttttggtgaaagacgcgccagtcgccatgagaattcgtggcatttggaggtgagcataacttgcaacggaaaaaaaggtcaagttttgaacaagtaaaaggtttttggcttggggtagttggaagtaggcaacggagatgataatagaaagcagtcgtctttttagctaaaagaagaatgcactaagtcaatgaagaaatattaggaagcaactttacggaagttatg

SEQ ID NO: 2666 - DNA, 167 bp, Cyanidium caldarium
  Clone ID: LIB190-052-Q1-E2-G4
tcagcgtcgaactgcaccactcattgttctgtctcgccctcgctgtacagcgatctttatggttgtgtagaagaactctgtttcctgcaatatagaaaggtatgtagttcacaacctttgtacttcattatctaggttgctacgcttagttgtgatagaatacctca

SEQ ID NO: 2667 - DNA, 427 bp, Cyanidium caldarium
  Clone ID: LIB190-052-Q1-E2-H1
agacgatgatgtatttgctcccaccaatgaatacgtcattggaactgccaatatgttacgcttagtgtttcaagatatttatcctgtgaacatgcgcaaggaagaagatgaaggaactttgtttgggagatttccagatgatatttatgatggctatactagtaacgttccaggaaatccgtggattctatgtactttaggaatggcgcaatattattatgagttggcagcagagtggttgaaacatgaaaagattgtcataggaaagtggagcaaagactttttcagacatttgagggttatgcctcctccttctcctcctcaatcttctatatcaacgaccattactggaaaagcgatttgtagttatgtttctgcgctattagaagaaagagatcgcgtattgaatgctattcgaaagcataca

SEQ ID NO: 2668 - DNA, 387 bp, Cyanidium caldarium
  Clone ID: LIB190-052-Q1-E2-H11
agtgccctagttgccattactttgggaccacgtggagctttcctttctactcattccaatccttccgtcatagaaaagaatatcgcttgttttccttgtttgtcgccaggaaaggccgtctttcgacccaattttcaggcgaaaggcactatcaacgcagttggagcaggagacacatttacagcaggtatattagctatgcttctaagacaagcacattcttcatctttcctatctttggaattgttggcagatgttggattggctgctgctatgcaaagaattgactctggagtcgaaccaaaaacactgcaaaaacttgttatgcaactcgatgagatgccccgtgcttctgttcagtccctttgatcatttgtaataaatctt

SEQ ID NO: 2669 - DNA, 328 bp, Cyanidium caldarium
  Clone ID: LIB190-052-Q1-E2-H12
gaccaacgcgtcaacccacgcgtccgcgaagtattcaatcctccaaagaagcctatgacggatgatatcacaggaaagcctctggtgaaccgttcggatgataatccagaaactttaaggaagagattagaagcatttcataaaagtacggatccggtgatccgtaattatgagaagaaaggtattttaagtcaaaaaaatgcttcaaaagaaatcgatttaagtatcccaacaagtggagcaagctattgaagaacgacaaaggactgccaatgcagcctgaaagttgttttgcaagtaaaaagtgttgttgtttttttgtgcgttt

SEQ ID NO: 2670 - DNA, 400 bp, Cyanidium caldarium
  Clone ID: LIB190-052-Q1-E2-H4
tccggaaacattggttgcttggaataattgatttgaggttggacggaaacactcgtgatttggtacaacaggctgcggattacatcgttcgtaaagaatataaagtttccgatatatttcgaaaacgtctgtatgaaaaagacacgaggtttgcctttctttctccaaagcggtcgcaccacgaagaaatagtaagagaactggaagaaacagtacaaagactgggagccaaaagaaagcataaaacacaacacacctcagcgaaaagatatagaaaaactacagaaacggaagattatggagacagactgtccacagtttctatgggtaccttggcctcatatatgaaccgccacaaggaaagagtgccttatcaagtacttgatatggaagaaatact

SEQ ID NO: 2671 - DNA, 368 bp, Cyanidium caldarium
  Clone ID: LIB190-052-Q1-E2-H6
agaaagcaaggaaaacagtcgcaacaaaacaggggaataaaaataaacaagaatgtgtgtcccaagttgctgatattttaatggacaagcagcaatgcgaaatgctacaagaacaagtgaaagaatacttgttacgttaactgggtcaaaacccgttgaactcaagggatgaccaggagttcccgagtctatcaaagacgatcgaatccttggttcgaaatccagctcctcaaggtgaatccatcattctaataggacctgcaggctctgggaagaagaagctagtagaggaaattgtgcagaaaatgaaatcagaaagccagactcaacgtttgaaagtgattcaactgtacggaacttttcatgct

SEQ ID NO: 2672 - DNA, 413 bp, Cyanidium caldarium
  Clone ID: LIB190-053-Q1-E1-A1
cccacgcgtccgcccacgcgtccgcccacgcgtccggcatgatgaagagcgctatgaagttctttgtatttagcattattttggcaaatgttgttcttactattcaagcagcaacggttttggagactttggagtcactgaaatatacagagtatcttgacatggtaaaggctgcaggcctggactcgaagttcaacgactctgctgttacatggactgtttttgcagcaaacactactggagtcaatgccaccttggcaccaatgcacttggttatttctaatatcacatctaatgcgacggagagcatagacattgtggaatatacgttgtacaaccatactcttttgtcaaatgataataagacaaggagcacctatccttaccgccgtatacggaatgaatttgactgt

SEQ ID NO: 2673 - DNA, 364 bp, Cyanidium caldarium
  Clone ID: LIB190-053-Q1-E1-A10
gagccacgcgtcaatggaaagaatcgctcaagaaagagttattctttgcgatatatcggttctctggttgcggacgtacatagaactttactttatggtggtatatttggttatcctggagataagaagaatcctaatggcaagttgcgactgctttatgaatgtgctccgatgagttatttgattgaacaagccggtggaaaagctaccaacggaaaacaacgtattttggatatcgttccaaacacgacccatgaacgacagcctcttattttaggttcggaagaagacgtcgatgagttgatgcaactctacgcagccaagttgcaaagtaaagtctagttgtgtctcatggttgtgatga

SEQ ID NO: 2674 - DNA, 365 bp, Cyanidium caldarium
  Clone ID: LIB190-053-Q1-E1-A11
gcgtcaacccaaacgtccgcatggacctattgcagcacctacaccaccactagcgtaccatctcaatgcagcaaggccgtgactacctatactcaaacctgctgtgcttatgcccaacaaacttcctatgcagtcagtaccgagcaatatgttcaggaaactgtatctgctcaatatacttcttactacggcgaatcatcctccagctattattaccgagcagctgctcctcagagatggtatgaggaacaatgcacctcatactgctgggttccagtacagacctatgaaacttatcaatgttctcaagagaagaagaaggagtacagctatccttgtcaaacttatgagcaggtttcaactac

SEQ ID NO: 2675 - DNA, 354 bp, Cyanidium caldarium
  Clone ID: LIB190-053-Q1-E1-A3
ggcacgcgtcacgcttcatataaagcattcccaacactgttcgaaaaaatcactgcctaatgcgtttggcaattgatcatgtaaatctcaccattgacagtcgaaacactcattgatggtacaaacttcaacttgtgatacaacattgagaagaagtacgactcagttttgtcccaatacaaatatactggtccatgtcattacatccgtacgatcaacttttgcttaaggggatcgttggcttgatgaagaggagacttgggaggagaatactcataataataatgaggatgatgaggatgatgggaaagagtcgcaacaacaacaagaagaaaagcgtttacgcaagatggc

SEQ ID NO: 2676 - DNA, 421 bp, Cyanidium caldarium
  Clone ID: LIB190-053-Q1-E1-A4
cccaagcgtccggaaacaagcattggaagaaaagaatctaggcaatgaatattataagaagaaacaattccaacaagctatcgaacattataacaaagctattgaattggatccttggaatttatcttatcttacaaacagagctgctgcctatttagaaatgggcgagttggatagttgtattgaagactgtcagaaagcagtggattggaacaaggaatataacttgagaacagattataaaataattgccagagcttatgcaagaatgggcaatgcttatgcaaagaaacaagattatgacaaagcaatcgaatgttatgagaaatcgctgttggaatatcacgacgacaaagtatattcgaaaatggtacgaaatgaagaaactcaagaagaaattggaagaagagtcttatatcga

SEQ ID NO: 2677 - DNA, 411 bp, Cyanidium caldarium
  Clone ID: LIB190-053-Q1-E1-A7
aggccacaaccaaacttttgtattgtttttgattgtgatggtgtacttgtaaactcggaaccttattcttgtgagtcccttcgacaagctattcttcgagctactggcgtggatatcccacacgagtttccaaacgactattttgaagtgtttggtctatctgtctattcttccattgaatattatgtgaaaaagggaattctacccgaaaacacagatatcgatggtgtggctagaaaagtgaatgagttgaaggatccaatatatgaagaattagcaagaggaaagttatcaacttttcctggattgaaggctcttcttgaggaagcttgtgcgaaaaaggttgctctaggtgttggttcttccgggaacacgggaaaagatccgattcaatctaaaacaagcaggcat

SEQ ID NO: 2678 - DNA, 259 bp, Cyanidium caldarium
  Clone ID: LIB190-053-Q1-E1-B11
gcgtcaacccacacgtccgctcacgcgtccgctcaacgacgtagtgagactcactcagattctctttgtattgttctattcatctcgtattccctatcgttgcagtagctaatcctggggtcagtaaatcgtgcctcttttcactcgagggggtgaacactctgatatggtgctgcttatctctgggggaggagaactgatagaacaccagctagactatttatttttccggtctctagactttattcctggtgaagga

SEQ ID NO: 2679 - DNA, 142 bp, Cyanidium caldarium
  Clone ID: LIB190-053-Q1-E1-B6
acccaagcgtcagccaactcaccaagatgaatttgtaatccatcactggtagatcatctttgagatctaaggtcctttcttttcttttctatatggaaaattcagggagaaatggtttggtccagagctgccgaattttcca

SEQ ID NO: 2680 - DNA, 60 bp, Cyanidium caldarium
  Clone ID: LIB190-053-Q1-E1-B7
acccaagcgtcagcagacacgtagggtcaggaatattctcgaagaagatgcaattaagtc

SEQ ID NO: 2681 - DNA, 98 bp, Cyanidium caldarium
  Clone ID: LIB190-053-Q1-E1-B8
actcacgcgtcagcccacgcgtccgaaaaaaaatagaaagagaaaaaaaggagaaaaaaaataaaaaaaaaaaaaaaaaaaaaaaaaaaaaagaagat

SEQ ID NO: 2682 - DNA, 238 bp, Cyanidium caldarium
  Clone ID: LIB190-053-Q1-E1-C1
gcgtcaacccacgcgtccgacacacataaagaagaatgtcgacgacgcttattgaaaagaatgtggttcaatgacttgagtacttttccagtgacgtattcggttcttcttttatgtgtcattacttggtaataagatatgcctgttggtgactagttaccgagttgttactacgttgtttattacttatcaaggttggtcttatgatatcgttggttgtaactacgatcgagttgtt

SEQ ID NO: 2683 - DNA, 275 bp, Cyanidium caldarium
  Clone ID: LIB190-053-Q1-E1-C11
cacgcgtccacccaagcgtccgcgcatgcgtccgcccatgcgtccggatgctcattccaggagatcgtcaaagagcaaccagacttcgagccacgagagcactcaggaagatggtctagaggatggtattcaaagcaataccgtggagaccgatgtgtcacctccaggtggtttaggcattgcgaatctcgactagttggctgaacacgcggctcagagtctcgtcctccctacgacggaacgctctagacagtcccacgcatggaggccgtgaa

SEQ ID NO: 2684 - DNA, 284 bp, Cyanidium caldarium
  Clone ID: LIB190-053-Q1-E1-C12
cacgcgtcagggaaacgatgagaccgatgatcgggatgagctgcagagatctcccagagaagagcatgatccgagcagaccggaagactcagtccatgaggccagagagcctgataggtgagacggaggtcgaccccgtgttctcgttgccatcgaagtgttaccgagtcgtagtttagggagtctctcgctcaggggacttcgggcagcatgctgcacccagtctcgcctgacgtgagacggaaaccgcggtggattccctccattgatgcggtcaacccgtt

SEQ ID NO: 2685 - DNA, 424 bp, Cyanidium caldarium
  Clone ID: LIB190-053-Q1-E1-C2
gcgtcagagagaagagagaatgctgggtggagtagcgaaacaagagaagggaagtaaaaggtaagaaagaggaaaggtttacgagagaaggaagtagaaagaagagagtgtaaggcggcgtcataatagaaatccgaaaggagtagaagaaaagagagagaagaaagaaaagaagagaaaagccgtactgaagaccgacacaggtactcgaggagaaaggagacccaaattaaggtgagagaatggacgataaggaactaggcaaaaggatatggtatctgcggtagaacatatgaaagaagcagcaccgactgtttagcaaaaacacagcactctgcagaaaagagaaaatgtaaagtatagagtgtccggcctgccaaatattagagaagaaatcgatgaaagtgaaagcgagtaaaagatg

SEQ ID NO: 2686 - DNA, 325 bp, Cyanidium caldarium
  Clone ID: LIB190-053-Q1-E1-C3
gcgtcagcccaagcgtccggtgatcgcgacggagaaacgtatgccgtccattcttatggaaagtcatactttagaaaagatatcttttatttcggaaactacaggaatggtgtattcgggtatgggtcctgattcaagagtattattgagaaaggctcgaaagtttgctcaaagttactatcaaacctataaagagcccataccagtcgttcaacttgtacgagaaacagctttcgttatgcaagaattcacccaatctggtggcgtaaggccttttggtgttagtttgttgatagctggttgcgatgaacaaggaccacacctg

SEQ ID NO: 2687 - DNA, 416 bp, Cyanidium caldarium
  Clone ID: LIB190-053-Q1-E1-C6
aggtgggttgtggagtaagtgcgcttggcagcaaactaaaagatggcaagaagaatcatcggagcttatatgtctgacgctactgtagcgtctctatttagcgtgaaaatgttgttctaccttacaatacttgcgttctctatcactattgtgggtcttatgggtaagagttccgacggtatttgggttcacagtgttccagcgaaagacgaatattgtgcatacaagtcttcccttcaagtaaaccaccacggcatagcttcctattgcaagtatatcatggctgtagcagctattggtttggttatcagcttcttcgagttttggtatgcattcctcggaattttcttcaagtggcaacaaaagttgtggtatattgaatctgctatcaacgtgtttttctgggcttggtggtt

SEQ ID NO: 2688 - DNA, 357 bp, Cyanidium caldarium
  Clone ID: LIB190-053-Q1-E1-C7
aggtgggttgtggagtaagtgcgcttggcagcaaactaaaagatggcaagaagaatcatcggagcttatatgtctgacgctactgtagcgtctctatttagcgtgaaaatgttgttctaccttacaatacttgcgttctctatcactattgtgggtcttatgggtaagagttccgacggtatttgggttcacagtgttccagcgaaagacgaatattgtgcatacaagtcttcccttcaagtaaaccaccacggcatagcttcctattgcaagtatatcatggctgtagcagctattggtttggttatcagcttcttcgagttttggtatgcattcctcggaagtttcgtcaagtgg

SEQ ID NO: 2689 - DNA, 414 bp, Cyanidium caldarium
  Clone ID: LIB190-053-Q1-E1-C8
agcccacgcgtccgcccacgcgtccgaaatattcgtagaatggaacaaatattgttggagagtcaaaacaaagcgcttggacaggtgaaaaagggagccttgtctataaggtcgttgaaccacgtttccttttctgtacccgaaccagtgaagacgggcaagttcttttgcgagattcttggctttcgagtggttcgacgacccaacttcaattttgacggtatatggttgtacagttatggtattcaaatacaccttatcgaaggtgctgctctcgaaagaccaaatatcttgaaaccaaacacagaccatatatctttcgaagcggatgacctcacaagtatacagaataaattggacactttaaataatccgtatcttttggagtatcacgaacgggagaacttgagacag

SEQ ID NO: 2690 - DNA, 255 bp, Cyanidium caldarium
  Clone ID: LIB190-053-Q1-E1-D1
cgacacggttttcttgtcctctaagcgtttgcctttgcatcgttgtgggaagaacacaacaaccttcccaagccgccactttccaaaattccgccaaccaataagaccaagattggaatccaaggccaaatggtgaacaagtttggcaaaagatatgaaccccaaggacagagaacaagccaccatcccttcgggggaaaataagttgttgaaaactccccaagttgccaactttgaagatatgggatataaata

SEQ ID NO: 2691 - DNA, 329 bp, Cyanidium caldarium
  Clone ID: LIB190-053-Q1-E1-D11
atagatacgcctaactgtagttcacgattgatattgctgtcttgtttggtctttataacgactataactttggtaaatgcacaacgaaactattataaagtgctgggcgtggaaaagaacgcttccgagagtatgtggtttagcgttcattctccaagtttctttgacttttgttacgagaaattaagcgcgcgtatcatcaactagcaaggaagtatcacccggacaagaacggcggtgacaaccacgcggaactgacatttcgagaaatatctgaaggtaagtgctggtaacatgttggcttcctgcttcttttattccagttgttt

SEQ ID NO: 2692 - DNA, 394 bp, Cyanidium caldarium
  Clone ID: LIB190-053-Q1-E1-D12
aggtgagcgaaattcacttccttagtaactatgcgatgttaattttgagtttcacatttataggaaatttctctaaaattgacgattttcttttatttttttaaagttgtttaaaaataatttcaacaggtatccaaggttctttttatagttcttgtgatttgccgtacttgggtgggattggtttatgcgaggggcgtctgttttattcgatgcccgttcccaagttcctcgctcagctccttattgtgggcggtacatacttatttcgtgcgtttcttgaagcttacaagcaagctctgtacaacgctcaagtaagaagcactgcagcgggagcagcaagtcaagtttttcgtgaagaaggaaaaatgtccgtcgaagaagcttgtaatat

SEQ ID NO: 2693 - DNA, 256 bp, Cyanidium caldarium
  Clone ID: LIB190-053-Q1-E1-D3
cgcgtcaggggcagcgtctgcacatcctccagacatttgcctttggatcgttgaagcagcctgtacaatcgctttcataatctacggattacgattctcattgcagctaattagacggaaggtaggattcagagcctcaatattaatcaggtgtagcaaaagatagttccaccaagaacactgaccaagacagcattctttcaagagattattatgtgtgccaaactcccagattcgtcccagttaaacacaaggc

SEQ ID NO: 2694 - DNA, 412 bp, Cyanidium caldarium
  Clone ID: LIB190-053-Q1-E1-D5
agaaagaagccaattcgaggtggaatacctctgtgttttccacagtttggtccttatggttccctagcacaacacggatttgcacgcaactctatgtggcacttgaaacaaataggtacaacgaaagatggctcagccactggagtcgtgttgtctttatcttcaaaagatgtggatgctgcatggacctctgcgtggccttacgcttttactgcccaatatcagttgttattagggtttcaaggtctacaaaccaatttctgggtacgaaatgaaggagaggagtccttttctttcacgtttgcctttcacaactattttgatgtatctgacgtctctagttgtcaagtatttggattggaaaataatccctaataagaatcgtcaaaagaatgacgagtggaatgaacga

SEQ ID NO: 2695 - DNA, 417 bp, Cyanidium caldarium
  Clone ID: LIB190-053-Q1-E1-D6
gcaatatgcctagtcataaggaacaaaataaaggaattaaaatatcagctgacggttacgcactaaagttgagcggtattcggttggacgtagacggcagtttggtcactatggtggacgcagacgacctcagagccctcatgtttaaggaaagcctcaaggaaaagtcaaagctgcatgacccaaaatttttcaaaagctattatgaggagaataaggactacttttattatatgactcatacggagaagaaaatgtttctttctctggaagttgcacgagaatacgctactctggtgggaaactcgtttctgcagaaatatttggacaaagtcattgagcacgaacacgcatactaaaggaaccaacgttgttgccgataatttgccgtggtttgtctgtttgcgttctgttggg

SEQ ID NO: 2696 - DNA, 410 bp, Cyanidium caldarium
  Clone ID: LIB190-053-Q1-E1-D7
aggcagcttacaaatgtgaggaagccacttccgacattttgcgtgatattgccaaggaaacgtccaaaatgttgcgaagtttagaagaaggagaaaaaatttccaacctcggttccaagtttcgagacttggttcaccaatgtttgagtaggttcgacagtgcagtttctgatgtgaattccagtgctttggtgtcacgaaaacgaagagaacttgaagcaatcattgacacctcattaaatgctgtctttgtgaaacaactgcaggttttacgtgagaatgctttgtcgcagttcaaggcttccttatcttcggaagaggttccgagcgattttgcgttctttactgccgacagtatgtttgttcgaaaagcggaaggacccaattcgtcctggaagtgattggtcgta

SEQ ID NO: 2697 - DNA, 420 bp, Cyanidium caldarium
  unsure at all n locations
  Clone ID: LIB190-053-Q1-E1-D8
agcccacgcgtccgcccacgcgtccggaatggacgataaggaactaggcaaaaggatatggtatctgcggtagaacatatgaaagaagcagcaccgactgtttagcaaaaacacagcactctgcagaaaagagaaaatgtaaagtatagagtgtgcggcctgccaaatagtagagaagaaatcgatgaaagtgaaagcgagtaaaagatgaggtatagagaatggcggtcctaactgtaaggatccaaaggtagcgaagtaaatagacgtttgaaaggcgtccagtatgaaaggagaaacgagtgtagcactgtctagtcgtccaactcagcgaaacagcaataactgtgaaaatgcagtaaacgaacagtacgacgganagaccgcataattcttgactagataggtttagggaggaga

SEQ ID NO: 2698 - DNA, 371 bp, Cyanidium caldarium
  Clone ID: LIB190-053-Q1-E1-D9
gtggaaatatcccatcagctttccaaccttctccacgcggtatacgagtgcgaatataccgaggtggagtggctaccttgggtttgttgttcagacactgtcgaaaacgcaatagtatgggaagacatactggtgcttcaaggcgccaaactgctggatatttatgctgaaggattacaactgttcaacaagtttcgtcgtcacctgatgaacgtgtcctttgtgggagacagcaaactatgggattcactatctcgtttcttgctgtttatccaaccgagtcattctacttgttggaactttcgaaagtttctcgttcaacaccatcacgcttcctatcttatggagctaaaagtgagtgaaattgcctt

SEQ ID NO: 2699 - DNA, 395 bp, Cyanidium caldarium
  Clone ID: LIB190-053-Q1-E1-E11
acccacgcgtccgtggttgtggaacaaaagtggatcaagaaaggatgacttatggttttgttggcgctagttcttgttcctgtttggtttaccgcaatcctcgcaacttggctaaatgcttcccaacaaaggaacataaaattttccgtcgcgctaccacacacacgtgtaaaactactatactggcggtagacaagtcgtcttcttcaactagtaatgttggcaagacagaacaaagcaagccttttgaaccgaagaagagtgaagaggcaaattcctttcaacagtccttttctagcatgccttcgatgcaaaataactggttttcagatccttccaagttcaacgccaaagtacaagatgtagctcaagacatactccatagacctactttc

SEQ ID NO: 2700 - DNA, 347 bp, Cyanidium caldarium
  Clone ID: LIB190-053-Q1-E1-E12
ccacgcgtcagggaaaaaaatggtaatttagttgaaatcaattactctggaacgtttcacaaacgttcagcaagagcaaacaattatgtcagttttctgcatcttctgaaagggcaagaaatccacaacacttgcgcttttctcggcatatgtccttgagatatatctttcggcctgtgtctccactttaccaaagcattcagaggccgactccttggagatgtttcctatgtaatttatgcatagtacgtactacaaaggatttgtcagtactatgttgatgaaaataaggaaaagagtctgtctccttgttcagagctattgtgtttggcgtgcacgaactgtcc

SEQ ID NO: 2701 - DNA, 349 bp, Cyanidium caldarium
  Clone ID: LIB190-053-Q1-E1-E2
gcgtcagggaaaaagaaggaaagaatagtgagtttgtacaacaatggccagtgatccatcgttgttttgcttggaagagagtagaggaagtcattcaagcgttaaagacagagaccgaagcaactgcagattctacaagcaagtttgcacaacaagccttggaacagatattgaaaggttctccaacgagtctcaaagtaactttggagtccatcgaacaagcttcaaagatgacattgaagcacaccttacagaaggatttccgtatgtcgatgcactttatgaaaggtcacgacttttatgaaggcattcgagcaactttggtagatacgggtagaaaccctaaatg

SEQ ID NO: 2702 - DNA, 418 bp, Cyanidium caldarium
  Clone ID: LIB190-053-Q1-E1-E3
agagaaagaggaaagggatgaaatgcagagatctctagagaaaggcaagaaagaaaagaaaggaagacacagtaaatgaggcgagaaagcataggaagtgaaacggattaggaacccgtgtagtctatgcagtaaaagaaagaatgagtaagaaaaaagggagtcattccaccaggggagtaaaggcgcaagaaagaaacccaaagcaattgacgggaatcggaaaaaggggtggatcacgtaaattaatccgataaaccgagaaccttacctctccaagaaggtgttgcacggctgtcgaaagaacgtgctgtgaagtgagagaacgtacgagaaagccaagtgagggaaaagagggaagttaaagggcggccccagaaaggagagggcgtaagacgtgatacagagtaggaagaaa

SEQ ID NO: 2703 - DNA, 327 bp, Cyanidium caldarium
  Clone ID: LIB190-053-Q1-E1-E4
acgcgtcagcccaaacgtccgcttggatgaaatgcgcaagatgtctagcaaaaagtcaatcggcttgttcaaggtcatgagtgaataatgtcactaggtcatatgatgtaattccgattatcataccagtgtaggctatgcacatagggcgaaataatgacgtacaagtttaacggagtcattccaccaggggagtcaatgcgcaagaaagaaacccaaagcaattgacgggaatcggaaaaaggggtggatcacgtaaattaatccgataaaccgagaaccttacctctccaagaaggtgttgcacggctgtcgaaataacgtgct

SEQ ID NO: 2704 - DNA, 351 bp, Cyanidium caldarium
  Clone ID: LIB190-053-Q1-E1-E5
agttgggttgtccactggtcatggaggaagaagcgttattcaagtaagcaggttgtcctgtggttgtgatatcacagaaaatttctagttatgtgaatcaacattcggaagaatatatacaccgtttgagggaagccgttgctctggattcagttagttcggatcccaataaacgctcgcgttgcttggatatggccaactatatttgcaaatggatcgaaaaattgggaggaaagcctattgtaaagcatataggcaaacaaacgtttcctgatggccaagttttggactatcctcacatcctatttggagactttactgtggacaccagggagaaaccagtgctcttgg

SEQ ID NO: 2705 - DNA, 363 bp, Cyanidium caldarium
  Clone ID: LIB190-053-Q1-E1-E6
aggacagagctgccacagagctacttgtgaagactgccctcgaagagcacggactgaactttgatcccttagatacggacaaggacctggtatatcctgagaaatattatgagccttgtggaggcgaaatgtggatccttgaaaaggataacacagtggttggctgtgctgcctttttgcctattcctgatacgtgtgcggtagagtttcgaaagatgtacttttctcctagcataagaggcaacggttatggaaagctaatacttggagctttagagtatcgagcctttgagttgggatacacatagggtagattggaaacgtcgcaccttttagaagctgcttgcaagctttacgacaaga

SEQ ID NO: 2706 - DNA, 87 bp, Cyanidium caldarium
  Clone ID: LIB190-053-Q1-E1-E7
agcgtcaagacagacctgccaaagagctacgtttgaagactgcccgcgaaaatcaccgactgcgctttgatcccctagatagcgaga

SEQ ID NO: 2707 - DNA, 407 bp, Cyanidium caldarium
  unsure at all n locations
  Clone ID: LIB190-053-Q1-E1-E8
agaatggagtggagaaggaagaggagacactagtccaagttcggatccattaacttttaccaaactttatgtgggttctattcacttttctattagtgaagaagatttacgcactatttttgagccttttggggaagtcgtttccttgcagcttcacaaggaccctgaaacgggacgttcacgaggttttggttttgttcaatacagaaaccacgaagatgcgaaaaaggcattggaacaattgaatggacttgatcttgctggtaggcctttaaaggttggtttggcaactgcagagactcagaaacttcaagtaatgggtgctattccttcgggagttcctagtacaatagctgcgaagagcttatcangtaggggttatagtgcatatattagtganatggatg

SEQ ID NO: 2708 - DNA, 346 bp, Cyanidium caldarium
  Clone ID: LIB190-053-Q1-E1-F11
ccacgcgtcaaggacacgttcggggtgagattggagatccattcgtcgaggcttcggcccgtgacctaaggtcgtgaccagttataatatatttagtgcatagtaaaccctgtgtcgtgtgcgcgggtcccatgtcttatcatagagattgcgatcagtattgggcttatgctaacctgtgacttggtagatcgcttgtggcagcttgtagactccgaggtaataatccttcactctctccagtcggttgaacaccacctcaatatctcatcatcctcatagtcgccttgtgttactgagaacacccccacagtggactcctgtatcgagaaaactggtgacgacg

SEQ ID NO: 2709 - DNA, 242 bp, Cyanidium caldarium
  Clone ID: LIB190-053-Q1-E1-F12
gcgtccaccctcacgttcggggttacattgggcctccactgatcgtggctgcgccccgtgtcctagggtcgtggccagctctactagtttcactggatactacgaccaatgtcccgtgcgcgggtcccatggcttttcctggacgttgcgttcagtatcgtgatgatcctgccctggcatttgtgagagagcctgaagcagaatgtggaacacgagggacgagtccgtcgctcgctccagtc

SEQ ID NO: 2710 - DNA, 341 bp, Cyanidium caldarium
  Clone ID: LIB190-053-Q1-E1-F3
cgcgtcaggttaacagagacaacatcgaagtaatagaactggtaagtggagtaatcatgaatcatatcaacgaaggaatggagaatataccgaacgattacatgaaggacgagatactacgagaaatgataaggtggatatatatatcgataataagtgtgacagtaatatacacgaggagaaagacaggaaagaggtgtatgatgcacgcaaagaagtgacgcactagatcagagagtaacacatgcacgtacgtaaagccaacgggtgactcaagacgtgtgaaagagtggaacaacatgaaagcacacaagaatgtacgacatggttacagtcaccac

SEQ ID NO: 2711 - DNA, 416 bp, Cyanidium caldarium
  Clone ID: LIB190-053-Q1-E1-G1
aggacaatggttgcaaagactgctctgagttgcctctttctctctttccttatcgctgccgcagttgcagccgacgtagtttcagaggagagatggggatatgctcagcaaacccaacaacagcaacagtgccaacaagtatgtaaacagtatgcatactatcagagtccagtctgcacttccgtaaccacacagagcccatactggacccaatgctcgaagactgtgcaaacctttgtcccaagccagtgcagtacttatacccaatctcctacatggacctattgcagcacctacaccaccactagcgtaccatctcaatgcagcaaggccgtgactacctatactcaaacctgctgtgcttatgcccacaaaacttcctatgcagtcagtaccgagcaatatgttcaggaaac

SEQ ID NO: 2712 - DNA, 411 bp, Cyanidium caldarium
  unsure at all n locations
  Clone ID: LIB190-053-Q1-E1-G12
catctacagagagtagcaatacgaaccgacaacctttcctcggcttgccttcttctcagtccgtttcaggctttccatatttaagatcttttttgattgttattgttgctattctggtgacctcttttctctcctggaagcacgcaaaaacagtccacaaggatgctccgttattgacaagctcttattgcagaagcttctctgggcctagctttcctttcgtattgcgttctacaagagtagtgacggataaaggtatttatattgtcttgtttgcttgtctaagttttcgtcgttaggaacttttcccgcttccatatttgtcgatagcgctggtttcatctcgagagtagttcctggtttggttgaagactcgacttggggttgtcttcatgatgtangaaatctggt

SEQ ID NO: 2713 - DNA, 126 bp, Cyanidium caldarium
  Clone ID: LIB190-053-Q1-E1-G2
gcgtcagtgaaacaaactttgcgaacggttgtaggagtgcatacgacacacacaggagtatgctttcctgttttgtatactgaattgagtatacctagtgtagaatcacttagagaagaacgccgg

SEQ ID NO: 2714 - DNA, 288 bp, Cyanidium caldarium
  Clone ID: LIB190-053-Q1-E1-G6
agcggacgcgtgggcggacgcgtgggcggacgcgtgggcgaggatcgaatgcagacgctgtagttttgtgattgtttcgtgttttgtcaagcttgtctcagtaataaaaagtgacatttttagttgaaaaaaaaaaaaaaaaaaaaaaaaaaaaaaaaaaaaaaaaaaaaaaaaaaaaaaaaaaaaaaaaaaaaaaaaaaaaaaaaaaaaaaaaaaaaggaaggcagcaaaaaaggataaaaaacttacgttaacgtgaatgaaaatttaaaaagcttttttaaaggg

SEQ ID NO: 2715 - DNA, 417 bp, Cyanidium caldarium
  unsure at all n locations
  Clone ID: LIB190-053-Q1-E1-H3
agcccacgcgtccggggcaaccaactaccaccaaaagtagcaactgcaaggaagaacagagtgtcctaaagaatagcaagttgtgatgaggagaattggtagcaaactcttgtcttattccggcaatgaagtaaaacttcgggatgttgtttcttctctaagggagacgagtaaagcgacggggtcttccatccggagttggcttcgtgatatcaaccagtggtatgaagacacttactataaaaagggaaaggtggatcctttggtacattatatgttactttgttttggagtgggatataccatcaattactcccatatcaaacataaagtggagcataagaatgacgatattgaaagcttgttaaagtcancnttgttgtgttgtggtgatggctgacgcatagttggtgatat

SEQ ID NO: 2716 - DNA, 420 bp, Cyanidium caldarium
  Clone ID: LIB190-053-Q1-E1-H6
agccaaaagtttcaaactgtgttgttatgactatgccattttgctttgtatttgatacgacttttaagttttcaaaaattccttatcgaaggtcttctaccgacctatgtaaacccaagcaccgttcgtctccattgaaacacaatacccaagcggtcttcttcaaggagaccgaaaagacaaagtctacagaacctgttaatgttaccagcgctcccaactcaaactcaaagtcggtcacatttgacggacagttgaataagtctgcttctaatacatctccacgaaccaatatatctctggactctgcaaagttaaaggagtactcttcgaagtttctcaacgatatttctttgcgacccgggttctacggtcaactggcactagctggtctagttggaatcatttgcatacagataa

SEQ ID NO: 2717 - DNA, 357 bp, Cyanidium caldarium
  Clone ID: LIB190-053-Q1-E1-H8
agcggacgcgtgggcggacccatgggctgacgcataggttgataatggaataatcgcggatgcaaagcgctctcggaggcgtatgcacagggatagccagaaaactagcgaggaattcttaaatctcaaggagtatgtgaaggagtagtgtaaataagcgcagggtgctatttgagtagtaaaatgtaaaccgcgtgtcttttgcatcatgtcacagctagtgataggtgaagcagatagcattggctcagacgtagccatgtaacacccgatactacttgatcttatgctgtccaaacgacgtaaagctggaccagtatctgtgagaacagatttggcagagatggcataatgggt

SEQ ID NO: 2718 - DNA, 350 bp, Cyanidium caldarium
  Clone ID: LIB190-053-Q1-E2-A10
atggaaagaatcgctcaggaaagagttattctttgcgatatatcggttctctggttgcggacgtacatagaactttactttatggtggtatatttggttatcctggagataagaagaatcctaatggcaagttgcgactgctttatgaatgtgctccgatgagttatttgattgaacaagccggtggaaaagctaccaacggaaaacaacgtattttggatatcgttccaaacacgacccatgaacgacagcctcttattttaggttcggaagaagacgtcgatgagttgatgcaactctacgcagccaagttgcaaagtaaagtctagttgtgtctcttggttgtgatg

SEQ ID NO: 2719 - DNA, 412 bp, Cyanidium caldarium
  Clone ID: LIB190-053-Q1-E2-A11
ctgcccacgcgtccgcatggacctattgcagcacctacaccaccactagcgtaccatctcaatgcagcaaggccgtgactacctatactcaaacctgctgtgcttatgcccaacaaacttcctatgcagtcagtaccgagcaatatgttcaggaaactgtatctgctcaatatacttcttactacggcgaatcatcctccagctattattaccgagcagctgctcctcagagatggtatgaggaacaatgcacctcatactgctgggttccagtacagacctatgaaacttatcaatgttctcaagagaagaagaaggagtacagctatccttgtcaaacttatgagcaggtttcaactacttaccagtgtggtcagtacgagtcccaacaagtttactaccaatgccaaaa

SEQ ID NO: 2720 - DNA, 338 bp, Cyanidium caldarium
  Clone ID: LIB190-053-Q1-E2-A2
acgcgtcaacactatcgacaatggatgcgacaacggcatcaacagtggatgcaaaatgaagaagaagaatcgacagaaaatcatcatggcaagccttggtaacgtcgaaagacggcagatagtagtaatagtagtagtagtaacaatagtagcactagtcaaaaaggtcctagtacgagtgttttgggacatgttgttgcatccgatggccaagcaaagaaaagaggggattgttgggttgatgaagaagagacttgggaagagaatactcataataataatgaagatgatgacgatgaatggaaagagtctgaacaacaaccagaagaaaagcgttt

SEQ ID NO: 2721 - DNA, 208 bp, Cyanidium caldarium
  Clone ID: LIB190-053-Q1-E2-A3
tcaacccacgcgttcgcaacactgttcgaaaaaaacactgcctattgcgtttggcagttgttctgtaaatctctccattgagagtcgaaagactcgttgttgttagcatcttcaacttgtgatacaacattgggaggaagtgcgcctaagttttgcatcgaaaataacatacaagtccgtgtcataatacgtgtgtagcaagcgtttg

SEQ ID NO: 2722 - DNA, 420 bp, Cyanidium caldarium
  unsure at all n locations
  Clone ID: LIB190-053-Q1-E2-A6
aggaggaagtattcaacaaggcagcggaagaagtaaaaaaactgtcttcggcatccaacgaagacaaactggagctatatggttactttaaacaagccaaggagggtgattgctccaccgaaaaaccaaaaggtctttttaatcaaaaagaaaaagcaaagtgggacgcctggaattccaaaaaaggtatttccaaagaagaagcacagaaaaagtatatcgaaaaggtcgatcaactatgcggcacgcagtttcttcaaagcgtttcctagtcaccttaggtccttgctctttttttggtttgtcggtcctaattcccaaaaaatatgagtaaagtacccgtttttttccgcaaaaaaaaaaaataaaacagaaaaagaaaccaatgtaatctaaacaataaaanaaanaatgaataag

SEQ ID NO: 2723 - DNA, 423 bp, Cyanidium caldarium
  Clone ID: LIB190-053-Q1-E2-A7
aggccacaaccaaacttttgtattgtttttgattgtgatggtgtacttgtaaactcggaaccttattcttgtgagtcccttcgacaagctattcttcgagctagtggcgtggatatcccacacgagtttccaaacgactattttgaagtgtttggtctatctgtctattcttccattgaatattatgtgaaaaagggaattctacccgaaaacacagatatcgatggtgtggctagaaaagtgaatgagttgaaggatccaatatatgaagaattagcaagaggaaagttatcaacttttcctggattgaaggctcttcttgaggaagcttgtgcgaaaaaggttgctctaggtgttggttcttctggaacaccggagaagattcgaatcaatctaaaacaagcaggcaatccttcccaattc

SEQ ID NO: 2724 - DNA, 364 bp, Cyanidium caldarium
  Clone ID: LIB190-053-Q1-E2-A8
agcccacgcgtccggtttgattgggctgtggaagcagttgtagactttttcatgatgtggtggtggtctgctggtgctttgagtgtgatgataccgaaacctactgccctgtttcagcggagatatggttttggtttggaagttagtatgattgcagcctttacctggttgaactttggttttcactttatcgaagtctatttgtctattttgacgatatatgttggatagcgcaagctagtccatactgaagaagatgaagacgctgactatgagggcgctgatgctcattcggttttgtcggaaaggagtccctacaagtctgtttgtgtgtgtgtgtggtctcgacatgtggtggtacttc

SEQ ID NO: 2725 - DNA, 87 bp, Cyanidium caldarium
  Clone ID: LIB190-053-Q1-E2-B11
cgctcatgcgtccgctcaacgacgtactgagactcactcattttctctttgttttgtcttttgtggctgtcctcctcgtcgctcacg

SEQ ID NO: 2726 - DNA, 223 bp, Cyanidium caldarium
  unsure at all n locations
  Clone ID: LIB190-053-Q1-E2-B2
acgcaatatatcaacaagtgacagctgcacattagtaaagcgaacgggtgagttaagatgcgtgaacaagtgacggaatatatcacacagaaagattaagaaatggttagagtacaaagcataaggtagtaaaagcaggaatctgatatgagganagccacattggcactgacattatgcccaaacatcacacgtcatcactggggaacattgggcaatgtac

SEQ ID NO: 2727 - DNA, 184 bp, Cyanidium caldarium
  Clone ID: LIB190-053-Q1-E2-B4
acgcgtcaacaaggactttgtactccttgttacttgttgcccggtgcaagataagctcgttgaaaagtactggctcccgagtatagaatcgtacgcggaatagccggctccaacagcggaacacacaaccaaaatagtttattggcgtgtcttggaatttggtcaaaaaggcctgtacgcgaca

SEQ ID NO: 2728 - DNA, 100 bp, Cyanidium caldarium
  Clone ID: LIB190-053-Q1-E2-B6
gtcaaccaactcaccaagatgaacttgtaatccatcactggcagatcatctttccgatctaacgtccattcttttcttatccacaaacaaaactctcgga

SEQ ID NO: 2729 - DNA, 72 bp, Cyanidium caldarium
  Clone ID: LIB190-053-Q1-E2-B8
gacccaaacgtcagcccacgcgtctgaagaaactaacaaaaaaagaaaaccgaaacccaatcgcacaaacaa

SEQ ID NO: 2730 - DNA, 444 bp, Cyanidium caldarium
  Clone ID: LIB190-053-Q1-E2-C10
ggtcgagcacgcgtccacccacacgtccgcccacgcgtccgcccacgcgtccggatgctcattccaagagatcgtccaaaagcaaccaaacttcgagccaagagagcaacgaggaagatggtggagaagatggtattcaaagcaatactgtggagaccgaggtgttacctccaggtggtttaggcaatgctaatctcgatgagttggctgaaaatgctgcaaagagtctcgtcataagtaggacggaaagcgccaaacagtcccaagatggaggcggtgaagcggatgaaaacttggaatggtgtgcggacacatcaaaagaagcaattaaggcaaggcaagcggaagctgcagcagctgcaaaggttttggaaggtttgacggattcgaagaagaagaagaacgtcaatgttcctgtggagaatgacaaggaagtggaaaaag

SEQ ID NO: 2731 - DNA, 424 bp, Cyanidium caldarium
  unsure at all n locations
  Clone ID: LIB190-053-Q1-E2-C12
cgtccaggaaaagagagaaagaggaaagggatgaaatgcagagatctctagagaaaggcaagaaagaaaagaaaggaagacacagtaaatgaggcgagaaagcatangaagtgaaacggattaggaacccgtgtagtctatgcagtaaaagaaagaatgagtaagaaaaaagggagtcattccaccaggggagtaaaggcgcaagaaagaaacccaaagcaattgacgggaatcggaaaaaggggtggatcacgtaaattaatccgatataaaccgagaaccttacctctccaagaaggtgttgcacggctgtcgaaagaacgtgctgtgaagtgagagaacgtacgagaaagccaagtgaggaaaagaaggcaagtagagggcggcccgagaaagaggaaagggatgaaatgcagagatctct

SEQ ID NO: 2732 - DNA, 354 bp, Cyanidium caldarium
  Clone ID: LIB190-053-Q1-E2-C3
acgcgtcagcccaagcgtccggtgatcgcgacggagaaacgtatgccgtccattcttatggaaagtcatactttagaagagatatcttttagttcggaaactacaggaatggtgtagtcgggtatgggtcctgattcaagagtattagtgagaaatgctcgaaagtttgctcaaagttactatcatacctatcaagagcccatatcactcgttcaacttgtacgacaaacagcgttcgttatgcgagaattcacccaatctggtggcgtaaggccttttggtgtaaatttgttgatagctggttgccatttttttggaccacacctgtatcaggtcgatcctagtggaatcttc

SEQ ID NO: 2733 - DNA, 414 bp, Cyanidium caldarium
  Clone ID: LIB190-053-Q1-E2-C6
gtgggttgtggagtaagtgcgcttggcagcaaactaaaagatggcaagaagaatcatcggagcttatatgtctgacgctactgtagcgtctctatttagcgtgaaaatgttgttctaccttacaatacttgcgttctctatcactattgtgggtcttatgggtaagagttccgacggtatttgggttcacagtgttccagcgaaagacgaatattgtgcatacaagtcttcccttcaagtaaaccaccacggcatagcttcctattgcaagtatatcatggctgtagcagctattggtttggttatcagcttcttcgagttttggtatgcattcctcggaattttcttcaagtggcaacaaaagttgtggtatattgaatctgctatcaacgtgtttttctgggcttggtggtt

SEQ ID NO: 2734 - DNA, 251 bp, Cyanidium caldarium
  Clone ID: LIB190-053-Q1-E2-C7
acccaagcgtcagctcactctgtccggatattgccaatggaatgctgaacctgtacagaggcaggtaggatcataccgtattgatctatcacgtccatattgtctcaagttacctggaaactgttgttctaccttacaataattgcggggtcgatcactattgtaggtcatatcgctacgacttccgacggtatttgctgttacactgttccagcgattcgacgattattctgcatacaactcttcccttc

SEQ ID NO: 2735 - DNA, 418 bp, Cyanidium caldarium
  Clone ID: LIB190-053-Q1-E2-C8
cccacgcgtccgcccacgcgtccgaaatattcgtagaatggaacaaatattgttggagagtcaaaacaaagcgcttggacaggtgaaaaagggagccttgtctataaggtcgttgaaccacgtttccttttctgtacccgaaccagtgaagacgggcaagttcttttgcgagattcttggctttcgagtggttcgacgacccaacttcaattttgacggtatatggttgtacagttatggtattcaaatacaccttatcgaaggtgctgctctcgaaagaccaaatatcttgaaaccaaacacagaccatatatctttcgaagcggatgacctcacaagtatacagaataaattggacactttaaatattccgtatcttttggagtatcacgaacgggagaacttgagacagctgttc

SEQ ID NO: 2736 - DNA, 345 bp, Cyanidium caldarium
  Clone ID: LIB190-053-Q1-E2-D1
agcgacacggttttcttgtcctctaagcgtttgcctttgcatcgttgtgggaagaagcacactagctttcctagtcgtcacttttcgatatttcgtcaacctattagaacaaagatgggactcaaggaccaagtgttgaacatgtttggcagaggatatgaacccaaagacagagaacaagccatcattccttctggggaacattatgtgttgaaaactcccctagttgccaactttgaagagatgggatataaatatgccatgtttggactcggttgtttctggggagctgaacgtaagttttggcaaaccaaaggtgtttattctacagctgtcggttatgct

SEQ ID NO: 2737 - DNA, 395 bp, Cyanidium caldarium
  Clone ID: LIB190-053-Q1-E2-D5
agaaagaagccaattcgaggtggaatacctctgtgttttccacagtttggtccttatggttccctagcacaacacggatttgcacgcaactctatgtggcacttgaaacaaataggtacaacgaaagatggctcagccactggagtcgtgttgtctttatcttcaaaagatgtggatgctgcatggacctctgcgtggccttacgcttttactgcccaatatcagttgttattagggtttcaaggtctacaaaccaatttctgggtacgaaatgaaggagaggagtccttttctttcacgtttgcctttcacaactattttgatgtatctgacgtctctagttgtcaagtatttggattggaaaatattccctattatgatcgtcgaaagaatga

SEQ ID NO: 2738 - DNA, 389 bp, Cyanidium caldarium
  Clone ID: LIB190-053-Q1-E2-D6
gcaatatgcctagtcataaggaacaaaataaaggaattaaaatatcagctgacggttacgcactaaagttgagcggtattcggttggacgtagacggcagtttggtcactatggtggacgcagacgacctcagagccctcatgtttaaggaaagcctcaaggaaaagtcaaagctgcatgacccaaaatttttcaaaagctattatgaggagaataaggactacttttattatatgactcatacggagaagaaaatgtttctttctctggaagttgcacgagaatacgctactctggtgggaaactcgtttctgcagaaatatttggacaaagtcattgagcacgaacacgcatactaagggaaacaacgttgttgctgatagtttgcg

SEQ ID NO: 2739 - DNA, 397 bp, Cyanidium caldarium
  Clone ID: LIB190-053-Q1-E2-D7
gcagcttacaaatgtgaggaagccacttccgacattttgcgtgatattgccaaggaaacgtccaaaatgttgcgaagtttagaagaaggagaaaaaatttccaacctcggttccaagtttcgagacttggttcaccaatgtttgagtaggttcgacagtgcagtttctgatgtgaattccagtgctttggtgtcacgaaaacgaagagaacttgaagcaatcattgacacctcattaaatgctgtctttgtgaaacaactgcaggttttacgtgagaatgctttgtcgcagttcaaggcttccttatcttcggaagaggttccgagcgattttgcgttctttactgccgacagtatgtttgttcgagaagcggaagactccattcgtcctggaagtg

SEQ ID NO: 2740 - DNA, 393 bp, Cyanidium caldarium
  Clone ID: LIB190-053-Q1-E2-E1
agggaagaagaaggaaagaatagtgagtttgtacaacaatggccaatgatccatcgttgttttgcttggaagagagtagaggaagtcattcaagcgttaaagaaagagaccgaagcaactgcagattctacaagcaagtttgcacaacaagccttggaacaaatattgaaaggttctccaacgagtctcaaagtaactttggagtccatcgaacaagcttcacagatgacattgaaacaaaccttacaaaaagatttccgtatgtcgatgcactttatgaaaggtcacgacttttatgaaggcattcgagcaactttggtagataaggatagaaaccctaaatggcaaccggacaagttggaacaagtaactagagcaactgtagaagaatac

SEQ ID NO: 2741 - DNA, 443 bp, Cyanidium caldarium
  Clone ID: LIB190-053-Q1-E2-E11
ggtcgacgcccgcgtccacccacacgtccgtggttgtggaacataagtggatcaagaaaggatgacttatggttttgttggcgctagttcttgttcctgtttggtttaccgcattcctcgcaacttggctaaatgcttctcaacaaaggaacataaaattttccgtcgcgctaccacatacacgtgtaatactactatactggcggtagacaagtcgtcttcttcaactagtaatgttggcaagactgaacaaatcaagccttttgaaccgaagaagagtgaagacgcaaattcctttcaacagtccttttctagcatgccttcgatgcaaaataactggttttcagatccttcgaagttcaacgccaaagtacaagatgtagctcaggacatactccatatacctactttctatgcccagttgctagcagctactgttggta

SEQ ID NO: 2742 - DNA, 428 bp, Cyanidium caldarium
  Clone ID: LIB190-053-Q1-E2-E12
cgtcaaggaaaaaaagtggtaatttagttgaaatcaattactctggaacgtttcacaaacgttcagcaagagcaaacaattatgtcagttttctgcatcttctgaaagggcaagaaatccacaacacttgcgcttttctcggcatatgtccttgagatatatctttcggcctgtgtctccactttaccaaagcattcagaggccgactccttggagatgtttcctatgtaatttatgcatagtaggtactaaaaaggatttgtcagtactatgttgatgaaaataaggaaaagagtctgtctccttgttcagagctattgtgtttggcgtgcaggaactgtcgaaagcttcatgataatatgtgtttttgtgtccaaaacaatggagctgcctttggatagcagaaatgcaagtgctgctgccgtttg

SEQ ID NO: 2743 - DNA, 274 bp, Cyanidium caldarium
  unsure at all n locations
  Clone ID: LIB190-053-Q1-E2-E3
agagagaaagaggaaagggatgaaatgcagagatctctagagaaaggcaagaaagaaaagaaaggaagacacagtaaatgaggcgagaaagcatangaagtgaaacggattangaacccgtgtagtctatgcagtaaaagagagaatgagtaagaaaaaagggagtcattccaccaggggagtaaangcgcaagaaagaaaccanagcaattgacgggaatcggaaaaaggggtggatcacgtaaattaatccgataaaccgaaaaccttacct

SEQ ID NO: 2744 - DNA, 391 bp, Cyanidium caldarium
  Clone ID: LIB190-053-Q1-E2-E5
agttgggttgtccactggtcatggaggaagaagcgttattcaagtaagcaggttgtcttgtggttgtgatatcacagagaatttctagttatgtgaatcaacattcggaagaatatatacaccgtttgagggaagccgttgctctggattcagttagttcggatcccaataaacgctcgcgttgcttggatatggccaactatatttgcaaatggatcgaaaaattgggaggaaagcctattgtaaagcatataggcaaacaaacgtttcctgatggccaagttttggactatcctcccatcctatttggagactttactgtggacaccaaggagaaaccagtgctcttggcctattgtcattacgacgtcaaacctgcagatatccaaga

SEQ ID NO: 2745 - DNA, 374 bp, Cyanidium caldarium
  Clone ID: LIB190-053-Q1-E2-E7
agggttgggttgtccactggtcatggaggaagaagcgttattcaagtaagcaggttgtcttgtggttgtgatatcacagagaatttctagttatgtgaatcaacattcggaagaatatatacaccgtttgagggaagccgttgctctggattcagttagttcggatcccaataaacgctcgcgttgcttggatatggccaactatatttgcaaatggatcgaaaaattgggaggaaagcctattgtaaagcatataggcaaacaaacgtttcctgatggccaagttttggactatcctcccatcctatttggagactttactgtggacaacaaggagaaaccagtgctcttggcctattgtcattacgacgtcc

SEQ ID NO: 2746 - DNA, 337 bp, Cyanidium caldarium
  Clone ID: LIB190-053-Q1-E2-F10
ggtcgacgcccgcgtccacccacacgtccgggttgagattggttttcttttcgtccacgcttcgttccgttactttttgtcgtgacaagttataatataaaatggccaaagtaaaccctgtgtcgtcggctcctaaactaagtgtaactagagagatagctatcggtattgggcttggtatagcgtgtgctatggtatttcgccagtggcatctcggatacacggaaatgataagaaaatattatcgcgagttggatgagcaagaacagagttcctcgtcgtcgtgaaaaccgccttgtgtttgtgagatagcaataaagtggactcttgtttccat

SEQ ID NO: 2747 - DNA, 267 bp, Cyanidium caldarium
  Clone ID: LIB190-053-Q1-E2-F3
aggttatgatagaaaagatggaagtaatacacatggtaagtggactaatactgaatcatatgacagaaggaatggagaatataaggaaggattacatgaaggaggagattatacgagaaatgataaggtcgatatatatatcgataataagtgtgatagttatataaaggaggacaaagagacgaaagaggtgtacgatgcaagctaagaagtgacccactagatcagagagtaacacatgcaagtacgtacagcgaacgggtgagt

SEQ ID NO: 2748 - DNA, 129 bp, Cyanidium caldarium
  Clone ID: LIB190-053-Q1-E2-F7
ttgcatcgtctgctctgagttgcctctttcgctctttccttatcgctgccgcagttgccagcgccgtcgtttcagaggagagatggggatatgcgcagcagggccagcaccagcaacagtgccaacaag

SEQ ID NO: 2749 - DNA, 431 bp, Cyanidium caldarium
  unsure at all n locations
  Clone ID: LIB190-053-Q1-E2-G12
gcgtccacatctacagagagtagcaatacgaaccgacaacctttcctcggcttgccttcttctcagtccgtttcaggctttccatatttaagatcttttttgattgttattgttgctattctggtgacctcttttctctcctggaagcacgcaaaaacagtccacaaggatgctccgttattgacaagctcttattgcagaagcttctctgggcctagctttcctttcgtattgcgttctacaagagtagtgacggataaaggtatttatattgtcttgtttgcttgtctaagttttcgtcgttaggaacttttcccgcttccatatttgtcgatagcgctggtttcatctcgagagtagttcctggtttggttgaagactcgacttggggttgtcttcatgatgtangaaatctggtcgttatgcctgga

SEQ ID NO: 2750 - DNA, 304 bp, Cyanidium caldarium
  Clone ID: LIB190-053-Q1-E2-G6
gcgtcagcggacgcgtgggcggacgcgtgggcggacgcgtgggcgaggatcgaatgcagacgctgtagttttgtgattgtttcgtgttttgtcaagcttgtctcagtaataaaaagtgacatttttagttgaaaaaaaaaaaaaaaaaaaaaaaaaaaaaaaaaaaaaaaaaaaaaaaaaaaaaaaaaaaaaaaaaaaaaaaaaaaaaaaaaaaaaaaaaaaagggaggccgcccaaaaggttaaaaaacttacgtatcacgtgcatgaaatttcaaaacttttttaaagggtaaaacaatttc

SEQ ID NO: 2751 - DNA, 139 bp, Cyanidium caldarium
  Clone ID: LIB190-053-Q1-E2-G7
acccaagcgtccgcccacgcgtccgatggaggtaaactggtgttgggttggaggatcgagtgcagaagctgtagttttgtgattgtttcgtgttttgtcatgcttgtctcagtggggaaaggtgatatttgtagttgag

SEQ ID NO: 2752 - DNA, 69 bp, Cyanidium caldarium
  Clone ID: LIB190-053-Q1-E2-G8
ccacgcgtcagcccacgcgtccggactagttctgtattgattggctctacgtctgccaatagttttggt

SEQ ID NO: 2753 - DNA, 235 bp, Cyanidium caldarium
  Clone ID: LIB190-053-Q1-E2-H1
ggtctagaattacgggccgagcacgcgtcagggagaatggaagaggaggaggacgctgcgtattattcacaaatagataaggaagtagtcgagtctatggaagtttccgagagtgtttctgggtttcctgcagagacggagaagccttatagaataccaaactttacaccattgactcaagacgactttgacgaagacttgtggttttccatggaataaaagtatagttttttgt

SEQ ID NO: 2754 - DNA, 326 bp, Cyanidium caldarium
  Clone ID: LIB190-053-Q1-E2-H11
ggccgacgcccgcgtccaggcaagaaacacgcaaatactggaaagcagtcatcgatgatcgagaacggaacaaactgactatcacgaagaaaagatggagtagatcaggaccgaaagctcacggaagtcagagtaagcgcaggagtcatcttaatgaaagcaggaaagtcattgctcaagagagtgtacacctcgtcacttttgcaaaatctcacaacgagtgaaagaggaagccagaagattgcatcaccagtagccaggtaacacccgaagctacttgatcatatgctgtccatgcgaactactgctgaatcaatacctgtgga

SEQ ID NO: 2755 - DNA, 276 bp, Cyanidium caldarium
  Clone ID: LIB190-053-Q1-E2-H2
acgcgtcagcccaagcgtccgggaaaacaacgtggaaactatcgacagaaccaacttaagtgtacctccaatagtgtctgaacgtatgggaaagcgtatgttgtatgctgccagtgttcctctcaccttttttgttctcctttttggttccctattcgtggcaaagtttcagtttgatattacttttatgccatcggtagtagcgtatagttcgttgttgcttattttttgtaccatggcagcactgagttatggtattttttccgcctcgtggga

SEQ ID NO: 2756 - DNA, 418 bp, Cyanidium caldarium
  Clone ID: LIB190-053-Q1-E2-H3
cccacgcgtccggggcaaccaactaccaccaaaagtagcaactgcaaggaataacagagtgtcctaaagaatagcaagttgtgatgaggagaattggtagcaaactcttgtcttattccggcaatgaagtaaaacttcgggatgttgtttcttctctaagggagacgagtaaagcgacggggtcttccatccggagttggcttcgtgatatcaaccagtggtatgaagacacttactataaaaagggaaaggtggatcctttggtacattatatgttactttgttttggactgggatataccatcaattactcccatatcaaacataaagtggagcataagaatgacgatattgaaagcttgtaaaggtcaccttgttgtgttgtggtgatggctgacgcatagttggtgatatagga

SEQ ID NO: 2757 - DNA, 376 bp, Cyanidium caldarium
  unsure at all n locations
  Clone ID: LIB190-053-Q1-E2-H4
cattgttgatgagaccgaggttaatagggacatgaagacaaggaaacctgttctctttcggggtccagatggtcgcctacatcgcagagcttttatcggaccgaaaaagccacatactcaaataacaattagagagattgacattggaactttaaagcatagttcgagcgacccaaatctatccgttaggagaaaaaaggcggtagaaaacttcaataagcaagtgatgcgcggcgatatcgatgaatggagtttgaggaacctcgcttacactaccgatgatattcaaggctatgagtcagattctgacgaggcatccgantattcaagtaatgtcaatcagcactctcattcttatgcaactgcgtccaacagt

SEQ ID NO: 2758 - DNA, 95 bp, Cyanidium caldarium
  Clone ID: LIB190-053-Q1-E2-H6
gaccaagcgtcagcccacagtttcaaactgtgttgttatgacgatgccattttgcattgtacttgctacgacttttaagttttcacaaattcctt

SEQ ID NO: 2759 - DNA, 414 bp, Cyanidium caldarium
  Clone ID: LIB190-053-Q1-E2-H7
gacccacagacgtcagcggacgcgtgggctaagctattacttgtacaagaggaacgtaatggattgaccaagtgtgagaagcaaagtcaatggaacaggaagaggaaaggcgaacacagtagcgaataaatctatagtagaaagcagtaaggaaatgagtactgtgcatgaggacaggaaagtatttgaagaatagagtgtaaagcgcgtagcttttgcataatgtcccatcgagtgaaagaagatgcaataagaaagaaaaagaagtatccatttaagacccgaagctagttgatcttatgctgtcgaagcgacataaggctgacccagtatctgtggaaaatgatttagaagagatggcataaggggtgacatgccaatgacagctagtgatatctgggacaccgctaaagc

SEQ ID NO: 2760 - DNA, 365 bp, Cyanidium caldarium
  Clone ID: LIB190-053-Q1-E2-H8
agcggacgcgtgggctgacccatgggctgtacgataggtagatcagggatcgatcacgggtgcaaaacgccctcaaaggcgcaggcacttgaaaagcgagaaaagtagcgaagaaatctaaaatagcaaggagtaagagaaggactaatgtaaatgaacgcaggatactatttgagtaatacagtgtaaaccgcataccttttgcataatgtcccagcgagtgaaagacgacgcaaaatcaactaatggaatgtggccaggtacgcctagactcccgatgatattcaacggtacgagtcagattctgactaagcatccgataattcaagtaatgtcaatcagcactctcattcttatgcaactgc

SEQ ID NO: 2761 - DNA, 373 bp, Cyanidium caldarium
  Clone ID: LIB190-054-Q1-E1-A1
cggaaaaaggggtggatcacgtaaattaatccgatataaaccgagaaccttacctctccaagaaggtgttgcacggctgtcgaaagaacgtgctgtgaagtgagagaacgtacgagaaagccaagtgaggaaaagaaggcaagtagagggcggcccgagaaaggagagggcgtaagacgtgatacagagtaggaagaaaagagaagagagctagaaaggaggtaaaagaagagtaaaaggactagaagaggtacggaattcacgaggaaggagcgtgaaggaaggaggaatcccaagtaatcgaggaagaaaaagcttcggtgaaagcgtgaacggattttgtacacactgcccgtcaagttctggaagtgtg

SEQ ID NO: 2762 - DNA, 332 bp, Cyanidium caldarium
  Clone ID: LIB190-054-Q1-E1-A3
gcacgcgtccgagggcgtaagacgtgatacagagtacgaagaacagacaagatagctacaaaggaagtacaagaagactataacgactagaagacgtaccgaattcacgacgaaggaccgtgaaggaaggaggaatcccaagtaatcgaggaagaaaaagcttcggtgaaagcgtgaacggattttgtacacactgcccgtcaagttctggaagtgtgctaagaataagcaggagaagtataagagagtatgaaaagaagaaaggaagtgaagacgtaagacgtgaaaaaaaagcgtaagacgtgatacagagtaggaagaaaagagaagag

SEQ ID NO: 2763 - DNA, 361 bp, Cyanidium caldarium
  Clone ID: LIB190-054-Q1-E1-A8
gcgccgtcgtggtgtttttcgattcttgtcggcagtgttgggtgagaatagtaaaacatgacgagatattccaaggaaccagataacccgacgaaaacttgcaaagctcgtgcttcggatattcgcgtgcactttaaaaacacgcgagagacgggacgtgctttgaaaggaatgagcttacagagagcaaaaacttatttgaaaaacgtgatagagaaaaaagagattgtaccctttgtacgctatcgttatggtgttggtagaaaagcacaagccaaacaacacggttttcccaacggaagatggccgaagaagagtgcgttggtatttttggacttgttgaagaacgcagagtccaatg

SEQ ID NO: 2764 - DNA, 364 bp, Cyanidium caldarium
  Clone ID: LIB190-054-Q1-E1-B11
cgaaaggagtagaagaaaagagagagaagaaagaaaagaagagaaaagccgtactgaagaccgacacaggtactcgaggagaaaggagacccaaattaaggtgagagaatggacgataaggaactaggcaaaaggatatggtatctgcggtagaacatatgaaagaagcagcaccgactgtttagcaaaaacacagcactctgcagaaaagaggtgtatgatgcaggcaaagaagtgacgcagtagatcagagagtaacacatgcaagtaggtaaagcgaacgggtgagtaaagaggtgtgaaagagtggaagaacatgaaagcacagaagaatgtaagaaatggttagagtaaaaaccataaa

SEQ ID NO: 2765 - DNA, 384 bp, Cyanidium caldarium
  unsure at all n locations
  Clone ID: LIB190-054-Q1-E1-B12
agacgaaaagcaaattcccgcgcctattcgttcagaaacaactttagaagatgaacttgtcttagatgcaccagcacaaaagacattaaacttatataaagtagataattatacttttggcacgaagcagtcatcccaaaaacaacacgaaagaaatccacagcgtttaaaggaaaaatatcaagaaaggggtttgaggcactctgttgcaggagtacttcttgtacatcaccatcgacatccgcacgttcttgtattacaacaaaccaaggactctggaagtttttggcttcatgntgggcgtttggcgtccaagtgaaggtgactttggagggttatcgaggaaacttagatatcgcttaaggagtcnctcacaagagaagg

SEQ ID NO: 2766 - DNA, 381 bp, Cyanidium caldarium
  Clone ID: LIB190-054-Q1-E1-B2
agcgacaacaaccatcagaacaaagtttggttggttccgcaccgttattacctcatcgaccagaacagcagtatgtgaaaaacacagggaaaccaagaagaagagtttgcaaggaatcaacggaagagaaacatccaacgagacacaagttgaatcatgcaaaaccacgagataaggagattttggaagaagaggaaatcttcaatttactagaagcttttagaaagtattttccagaaccaccgagcaatttgagagctcaagaaataattgaagtaggtatttgcatcccttggcttttgaataattcacaggagaaagagtaggtctggtaggttctttacggagaaagaacagtgggagctgtgggaaaacgttttg

SEQ ID NO: 2767 - DNA, 360 bp, Cyanidium caldarium
  unsure at all n locations
  Clone ID: LIB190-054-Q1-E1-B3
cccacgcgtccggataaatatggaatcctggaaggtttgatgacgaccgttcatgcaactactgccacccaaaagacagtagatggaccttctcacaaggattggagaggaggaagaggaattttgaataacattattccatcttctactggagcagccaaggctgttggtaaagttattcctgaactgaatggcaagttgacgggtatggctttccgtgttccttgtccggatgtttctgtcgtcgatgtcacttttcgtttaaagacnacaaccacttatgacgatttcaaggcaacgatgaaagctgcgtcagaaagcaaagctttaaagggaatattggcatataccgaagatatg

SEQ ID NO: 2768 - DNA, 346 bp, Cyanidium caldarium
  Clone ID: LIB190-054-Q1-E1-B4
caacatcatcaaatgccaaagggaggaaagaaagattcttcaaagaaagaagccacaagtaaacctgcagcagcagatgctacaaagacgacagaaaagtctggtccggaagccaagttgaagggaactggtgcaaagaaacaatacaaagttgactatgcatgtgcagtcctgttatgttttgtgagttctgtttgatagtttccagctattcttttggtagtgaataaagagaaaattttttatatttaaaaaatttcgtttaaagacacaaaccacttatgacgatttcaaggcaaccaaggaaagctgcctcaaagatcaaagctttaataggaatattggc

SEQ ID NO: 2769 - DNA, 377 bp, Cyanidium caldarium
  Clone ID: LIB190-054-Q1-E1-B5
gaaataataaaagagagagagcaacgacgacaaagaaaatgaggttatttcaacgttggaaaagaattggcaactatttcatctactcgcaatactctagtcgaccgaatagtttatttcaagcagaccctaggaaatataatatatatttacagcatcgagtggagaaacacctagttgcccattctatggttgcagcatccctacataatcctcgctgtcttacaagttcttcatcagaacaacaacattggaaccaagtacacaaaacaacaacaacaccaagtgtggataatcatcctagtcgtgaagaagaaaagagtttggtactcgttcctggtcaagagacaaaagaagaacaaggagccaagcgacag

SEQ ID NO: 2770 - DNA, 395 bp, Cyanidium caldarium
  Clone ID: LIB190-054-Q1-E1-B6
atcgttgttgagatatgcaaacttccctcgcattctcttgttggacaccgttgcagcgaacttcaaagaacgtagtttgctcgtctagtttttgcaaaaatagctctattccgttccatgctaccaacagaaggagttgtgtttttccgctgtctttttttggagcgcctgtcgttagttataagtgggaagtggctgcaaacctgcagcgaaggcagtttggttcagtttccatggaggtacgtgttgacgtacgtgaaggtgaacctatcgattctgctatagcaaggtttcggagagaagttagcaaaagtggtcacttgtttgagctgaaaagacgacaagagtttgaacctaatagtgtgaagcgacaaagatcaaggaaacaagctcta

SEQ ID NO: 2771 - DNA, 376 bp, Cyanidium caldarium
  Clone ID: LIB190-054-Q1-E1-B8
cggacgcgtgggcggacgcgtgggttttcccaacagaaaatatacacaaacagtgataatctagaagaatacaatcaacttgagaaaaaaattcaagtaatcacaacttgcatctctatctcatatcatctttctatcatggaccaagtcgatgcattctatgcattgttgttgtgttgcttcctagaaaaacttgttgagagtgctatgaactgtttgccaataaagacgacaacggaggtgcaatgcccatttattggttggagatccaagcgtcgtgttctgccaacgtacaaaggataagcgtccatagcaactatatatggcacttgcagctacaatgtatgcaatgtagtgaaaaaacggggtggattgc

SEQ ID NO: 2772 - DNA, 340 bp, Cyanidium caldarium
  Clone ID: LIB190-054-Q1-E1-B9
tgatgagctgttccaacggcaaaagagaaacgagctctagtgcaacactgaatgacctttaaggcttgatttttccgattatcatactaaacgctgattttacacacaactcacgagaaattgatattagagtcgacgagaaagaaacatattgagaactgatgttaatctgtctagctgttggcaataagacaagctacggcgtctttccaagtttctttcaactcttataaacaaaacaagtaaaacgcctattcactactggtaaagtcttttctttcgataaaaaaaaaaaaaaaaaaaaaaaaaaaaaaaaaaaaaaaaaaaaaaggaaaaaggg

SEQ ID NO: 2773 - DNA, 399 bp, Cyanidium caldarium
  Clone ID: LIB190-054-Q1-E1-C2
cccacgcgtccgcccacgcgtccgcccacgcgtccgcgatgcggagtggaacataatttacgacaagttggaaaaaatcgtcgctacaggtgccaaagttgtacttagtaagttggccatcggagatttagctacgcagtattttgccgatcgagacatattttgtgctggtagatttccagaagaagacatgaaacgtgtcatgaaagccaccggtgcaagcatgcagtctacagtgaataagctaactgatgatgttctcggtacttgcgcattgtttgaagagaagcaagttggtaatgaacgttacaactttttcactggttgtccatatgctagaacagcgacatttattattcgaggtggttcggagcagtttatggatgaaacggaacgttc

SEQ ID NO: 2774 - DNA, 137 bp, Cyanidium caldarium
  Clone ID: LIB190-054-Q1-E1-C3
tctatgcagactgatcctcaattcagggtaaaccatggattacttcgggttagtaatgatcgtttccacaagtcccgtagatgtattcaggaagttgggtataggagcttaaggatcgcattcctttgccgatggaa

SEQ ID NO: 2775 - DNA, 406 bp, Cyanidium caldarium
  Clone ID: LIB190-054-Q1-E1-C6
ggtgtatgatgcaggcaaagaagtgacgcagtagatcagagagtaacacatgcaagtaggtaaagcgaacgggtgagtaaagaggtgtgaaagagtggaagaacatgaaagcacagaagaatgtaagaaatggttagagtaaaaaccataaaggaagtaaaagcgggaatctgagaggaggaaagccacattggaactgagaaaaggtccaaacaagggaagtaaagcctaagaaagagtaaattaggcaagcaaaggcatgagagaagtataatagcagaagcatgcttgaagaaaaagaaagagatttcagaaagggaagaaaagtcagctatagagaacaggtgaaggagaactcaaaaagaggagagcaccgaacgatcgaagaagaaactttgggggtaac

SEQ ID NO: 2776 - DNA, 411 bp, Cyanidium caldarium
  Clone ID: LIB190-054-Q1-E1-C7
cccacgcgtccgcaagaacagtgggtgctttgtaccatgtctttctgtccttacaagtgaataggttcctatggttatctggactcattctggcagttgtaactattcttcaaaccctagttatgtatagaagctcaactatagaacagaaggtgtcctctaaacaaaagtcttcaaagaaagaccccagaaaagaacaaggagtttcaggttgtcctttgacgtggttccaataaaagcagtcattcaactacgccattcggttcacagctatggtttccttcttcatctttgaactgatcacatacaaccggtagaagcgatgggagtcgagacaagctagaaaaaggaactcgcaacaagtcaaagccacaaataagttgttaaccgaataactgtccaatacgggtt

SEQ ID NO: 2777 - DNA, 419 bp, Cyanidium caldarium
  unsure at all n locations
  Clone ID: LIB190-054-Q1-E1-C8
cgccctccatatttcactttacagacccaaaggagacctggtatggcctcatcttgccacttcccaaaaggcgttttccagagtctgccaagtaagtttcaagtgcgttatgggtgcgagcgttcatcctccaaagtctctttatataatacttattgttgtttgaaaataaactactctcgagtggcagtaacttggatacttgctgcaaccatgttttccaccctacctctgggtctctgttttgataatactgcgtggttttgctatgctgaagggatagaacgtgatttaggcaaagttggcggtggtgcagcaagctcggggaaaacctctactggtgtatctcggactgtaactagaggagtgaacctaagtggagcagatttttcgggacaggaccttantggtgtcagttt

SEQ ID NO: 2778 - DNA, 359 bp, Cyanidium caldarium
  Clone ID: LIB190-054-Q1-E1-C9
gccaatcaaagctagtgatagctggtactcctcgaaagctatataagtagcgtatgcaggaaagaagaaggtaaaggaagagaaggaagaagcagagagggactatgagcgagaaggtggatagtcgagagggaaaaagcccagaagccaagataaggtatcaaagtaaagaaagaaggaaaaggagaagaagagagggtaggcttagaagcagcaaaccagagaggaaagcgttaaagcatgaaagaaaagaaatccgaaaaagaagagaaaaaggtaagaaagaggaccgaatcagggtaagaggtagaggagcaagaagagaagagagaatgctgggtggagtatcgaaacaagag

SEQ ID NO: 2779 - DNA, 389 bp, Cyanidium caldarium
  Clone ID: LIB190-054-Q1-E1-D10
atcaattgtgtgttacctcgagaaacgtatatccacaattccttttctactctccaaggagtgtaccaagaaaaaccgtaaagaagacaactcaactcaattctgccaaacgaacgagtcctttctgcagtaactttgaagaatctgaagctctgtgactgcgcacggtcacgagacttgtatgaaaagtactagctcaaggttactactggaacaaaacaatactgcaattcacttgttcgatccattgcttgcaagcaacttacgagtcaaacagcgactcgaagaggcaccaacgttactattcttgcaagaatagatatcgcctagtgcaacaacataagtatatattggtatatttgcaattttagttcgtcaaaagatgctat

SEQ ID NO: 2780 - DNA, 378 bp, Cyanidium caldarium
  Clone ID: LIB190-054-Q1-E1-D5
cccacgcgtccgcccacgcgtccgggtgtccactcgtcgaggaagagctataaggtttcaagtggatgacgagaatttacgtgcaactagcagacttagtgtcggtgtacaagcaatttttttgcaacctggtgattgcctagccgatgtggatgtcattccatcgtcatggctccaaaagggatcctcggagttgtatttcttggcagttggcaaatatggaaaaggaaagagaataagagcattagatattccggaacgaaaacgatatcaagtaggagtttatgtgatgaagtttgatcggaagaaggaaccgaaagaagagcttcgatttttccgtgcgtgtcgaagcgatgaagttgtgttgtgcaccaacac

SEQ ID NO: 2781 - DNA, 334 bp, Cyanidium caldarium
  Clone ID: LIB190-054-Q1-E1-D7
gttggaattgagaggagggtcgacgagctcagcttgaagaataattaacttgcgtggggttggacgttatttatgaacttggactctattgacagatgaattaatgcgccttttgacccgtttgcagacgcctcacgtggatatgacgcaacagtatgcaaagatatagtgcatattcgcttgcaagatagatacggacgcaagtgcatgacgacgattcatgggcttgacacataattggatttgaatagtattacataggccttcaaagaggagttttgttgcaacggttgtgtcgtatacgacgcacatctgggaagagtcagccatctgc

SEQ ID NO: 2782 - DNA, 394 bp, Cyanidium caldarium
  unsure at all n locations
  Clone ID: LIB190-054-Q1-E1-D8
caaaagtgcgagcaagtaagactcgatattactagaatgaagcgtacgttgcagttcacgttgaccaagctccaagatctgaaagcagcctcattcaacagagatactacgcacagagagaaccggaagcaagtgaacggagttgacgaagaaatggaacctcaagaatggctccactggatagagacaaaggcagattcgtcaacactcgcatcattgaaaagccaggtacaaacgatatcaaaagaccagcaatggacttttctgtcctcncttttagagaaagcctattcaaccgtcaacagcgaagatttatcaaccgaatcctgctcagtgcaacagcttattcaaaagaaagacgaagaaatagcttttttgcggcaacgactagccg

SEQ ID NO: 2783 - DNA, 353 bp, Cyanidium caldarium
  Clone ID: LIB190-054-Q1-E1-D9
cccacgcgtccgcccacgcgtccgggacctcctctttccaaaaattatttctaccacgtgaaccgcaatacgaatagtgaaggagaacataaaaaacgtgcaagatgtatacaagaacaaccgcaagttgttttcgatcctagcagcccgatggaagaacaagcagcgacatcaccacaagatgaaagtccggctccgagcacgagtaatcctagtagtgcatcttggaatgtattgtctttaccagcagaaaaatggaaagagaaagcattggatgcagagaaacgtgctcagagaacaagacaagttgccaaagcaaagattaacgagtttcgtgaaacatgttatcattt

SEQ ID NO: 2784 - DNA, 402 bp, Cyanidium caldarium
  Clone ID: LIB190-054-Q1-E1-E10
aggatccatctaaagtccaacctatggctaagatttgacgggaaggagtttatgccgccacgtcccaaaatcgaatttagctgttggataaaattcggaacaaactatcctcgattagattacgcctacgtagatatgactgacgacggtaattggatgttgtacctcattcaagtttctgtttcatcttttccagctcatagcatagacttagcacagttggaacggttgttcaagaaaactgatggaactgttcaacttgcttcgttgctaaattcgttctttgctgaggttttagaagtctcgcctgtgtatgatgccagggagaagatagtgaacttcgaggtaacagactctcaaggcatatcttttcgagacagaatatctattttgtatgtgact

SEQ ID NO: 2785 - DNA, 290 bp, Cyanidium caldarium
  unsure at all n locations
  Clone ID: LIB190-054-Q1-E1-E11
agatacaattgacggaaacatttactaccaaaaatattctttctgcagccattagtattcctccttgtgacaaggaatgtaataataatgacgagaataacaattagaggttatcccaagtttccgttctcttttcttcctctttcatttgttccttgattctttccacaattagattggaaggggctaagaaatagaaaatagtttctattccattcttcagtcgagaattgggaatatgtggttctataccgatataaagatgaccaagaatggataagaacanaana

SEQ ID NO: 2786 - DNA, 262 bp, Cyanidium caldarium
  Clone ID: LIB190-054-Q1-E1-E12
aggctctaggtccaacccctgggttggttcctccaaaatttaaccaacccaattaacttatccccggaagttgccaaccgaagttacaaactttacaggcaactttattactacatacgcattcaaacatatgaccaatgcaatgacgaatacaggtacccttgttggtttccaaggaggtcctactaatctcggttggatgtatctcaagttctttatgccacagacccaagacaagactctcgaaaaaatgtgtgaaata

SEQ ID NO: 2787 - DNA, 295 bp, Cyanidium caldarium
  Clone ID: LIB190-054-Q1-E1-E7
cccacgcgtccgagtttggttgttttcttggtagcagttgtacattcaacatcatcaaatgccaaagggaggaaagaaagattcttcaaagaaagaagccacaagtaaacctgcagcagcagatgctacaaagacgacagaaaagtctggtccggaagccaagttgaagggaactggtgcaaagaaacaataaaaagttgactatgcatgtgcagtcctgttatgttttgtgagttctgtttgatagtttccagctattcttttggtagtgaataaagagaaaattttttataag

SEQ ID NO: 2788 - DNA, 373 bp, Cyanidium caldarium
  Clone ID: LIB190-054-Q1-E1-E9
agtttgggatgtttggcataagaaagctcccatgcagaattatctcttacacaacacaaaattctgttccgagtttggaatgcaatcgctttgttcggtagagacatgtcgtttattcgcaccggaatcagaaatgaatatgtttaattccatatttgaaagtcaccaaaagaacagagcaggcaacgaaatcatgttgcattatatttttcagttgttccaatttcctcgctcatacaaaagtttatcctatctttcacagctgaatcaagctctatgtatgaaatgtggcgtcgaacactttcgtagacaaatgccgttttgcatgggctctctttactggcagctgaatgattgttggccagtgactagt

SEQ ID NO: 2789 - DNA, 393 bp, Cyanidium caldarium
  Clone ID: LIB190-054-Q1-E1-F1
aaagtattccggtggaatgaggaggcggttaagcgttgccgtttcgcttattggatttccttcggttgtgttattggacgagccttccacaggactagatccagactccaaacacaagctgtggcaatgtatccaacagagaaaagagggcaaaactattgttttaacgacacactccatggaagaagccgaaagactgtgtgatcgtaccggtattatggccagtggaagtttgaaatgtgttggtcctccagaggaactgaagattcgtcttggaaaaggcttccgtctgaatatttcttgtccaagaagacgcgttaaacaagttctttcgtttatagaacaacagtatgcagatgcatttttggaccattccttaacgggtagtgttgt

SEQ ID NO: 2790 - DNA, 391 bp, Cyanidium caldarium
  Clone ID: LIB190-054-Q1-E1-F11
agcccacgcgtccgcccacgcgtccgcccacgcgtccgcccacgcgtccgcccacgcgtccggccatttttcttgtggaaagcgttcgatagaaaaatgccaagagttgttttggcgccttgttaatactcgttggtacatatataaattatgaataaagaaaatctccaaatagcgcaatttgagagactcacaacagagcaaatgcttaatctggtgaaagaaccttctaggggtttgtactacacagtcgaacacttgaggaaacgagggatacctcgtctggttcgcgaacaagagaaactcgacacagttattagtaaggaggacgacctcaagatagactgtcagtttgtacaggagacgatggaaatgtttcctgcagctgcag

SEQ ID NO: 2791 - DNA, 406 bp, Cyanidium caldarium
  Clone ID: LIB190-054-Q1-E1-F6
agcccacgcgtccgagaggggattggtgggtcacgaacgagaggatgttgttcttttcgtttttcaaaacgtttatcggcaaaacagttacagtagaactcaaaaacgatgtaattattcgaggcaaagtacattcagtggatcaatatctaaatatcaagttggaagatatagaaatactcaatatagaaagttgcccacagttgatgactttgaaaaattcttttattcgtggtagtgttattaggtatattcaagtatacgctatcgacgtcgactgcgagatgctacaggaagcagccagaagagaatacaaggagttgaagaaagtagccaaatagggcgcaagacacacgtgaccattgtctatctatccacggcgtgatgaaccaactgcaacttttgt

SEQ ID NO: 2792 - DNA, 390 bp, Cyanidium caldarium
  Clone ID: LIB190-054-Q1-E1-F7
agcagatggccaacgctggtcaagatggccttgtgcaagtcaacaaacatagaaaagtaaagagattgcaagaagataatatttaatagagcactatcacaaccaggagatgtatttctgtgcttttgcaacatccagttgttggtgaatgcagaaagagctattataggaaatattacttgtccagaaagtatcgaattgtgtcgtctattagctggacatatagcggtttggttcgatgaacatttggatgactttcgtttggaagctatcttgggagcactattgtgtacttgttattgtgagtggaagcgttttgaaggagaattgggggtacaagaatggaatgaattggagaagatatcttccttagatacttggaagcttgtg

SEQ ID NO: 2793 - DNA, 140 bp, Cyanidium caldarium
  Clone ID: LIB190-054-Q1-E1-F8
ggtcaggagtccccgggccgacgcaaacgtcagcatatggcaaacactggtcaacattgccttgtgcaagtcaacaaacatatactattcgagagattgcacgatgacaatatttactagagcagtatcacacccagggg

SEQ ID NO: 2794 - DNA, 413 bp, Cyanidium caldarium
  Clone ID: LIB190-054-Q1-E1-F9
cccacgcgtccgcggacgcgtgggtccttttcgtacattttggattgtggcacacaacatgaaaattcctgtccgactcgtcaagttttctttggaaaaaaagaagccaacttgtttcaacagaagtataagtggaatcgcctacactttttctcgccatggacaggtttctgatgtcttgaaaaaggagactcaaagctatgatgagaagaaacttggtccttcgcaagtactcgtgtcgtttcttgcctcaagtataggcacaacagatttggcgtggataagaggtatgggaaagataacagaagaaggatccaagttgcctttggttgccggtttagaaggtgtggcagaagtagtagcaactggcaatcaagtcaagtccgtgggtgttggagaacgcgtggtacctt

SEQ ID NO: 2795 - DNA, 387 bp, Cyanidium caldarium
  Clone ID: LIB190-054-Q1-E1-G1
ctcagtcagaactgcttctcagttagttacgcaatatgcctagtcataaggaacaaaataaaggaattaaaatatcagctgacggttacgcactaaagttgagcggtattcggttggacgtagacggcagtttggtcactatggtggacgcagacgacctcagagccctcatgtttaaggaaagcctcaaggaaaagtcaaagctgcatgacccaaaatttttcaaaagctattatgaggagaataaggactacttttattatatgactcatacggagaagaaaatgtttctttctctggaagttgcacgagaatacgctactctggtgggaaactcgtttctgcagaaatatttggacaaagtcattgagcacgaacacgcatact

SEQ ID NO: 2796 - DNA, 387 bp, Cyanidium caldarium
  Clone ID: LIB190-054-Q1-E1-G5
caaatggcgtcctttctactcaggatagcctcgctgtctttttgacatgtataggacaagtcattccacgtttttccaaagtatttagaggcgttgggaaaacttttgtccatagcaaggccatcgaccgtgtgacggatgtgttggatatgtcgttataccaagggccttgtggttggcgttatatgacgaatttgatggataaagacaaagtcgatatttgtgtggatgaaaatggaggtttaggttgtagttggattcgtgaaagagacgggttgtttttggtgctttgttggttaagtttgttgtcttggaaaaatgaaaatcgatcagagtggatgagcatagaggatgtgatggaacaacattggaacatgtatgggaaag

SEQ ID NO: 2797 - DNA, 223 bp, Cyanidium caldarium
  Clone ID: LIB190-054-Q1-E1-G6
ccgggccgacccaaacgtcagcacatggcgtcctttctactcaggatagcctcgctgtctttttgacatgtataggacaagtcactccacgtttttccaaagtacttacaggcgttgggaaaacgtttgtccatagcacggccatcgaccgtgtgaccgatgtgttggatatctcgttagtaccactggccttgtggttggcgtcatatgacgaatctgatgg

SEQ ID NO: 2798 - DNA, 414 bp, Cyanidium caldarium
  Clone ID: LIB190-054-Q1-E1-G8
cccacgcgtccgaattttttttggttccttttcgcatgtcttcagcagcagttggttcgcaggcagaaaaccaagacactcgacgtgccaacgcactaaaggagtatcaaagagtagtctcccagcatagagatattgaaaatagagtgcgaaggcttcgtgaggaagtgaaaactctcaagcaacaatttgataagacggaagatgacttgaaagctttgcagagtgttggccaaattattggagaagttcttcgagctattgatccggagaaatttattgtgaaggcttcaagtggtccacgttatgtcgtcggatgtagaaacaaaatcgatagagataagctcgtacagggagcacgtgtctctttggatatgactactttgaccattatgcgaatacttcctcgagagg

SEQ ID NO: 2799 - DNA, 286 bp, Cyanidium caldarium
  Clone ID: LIB190-054-Q1-E1-H1
agaaaatatgatacgacgaaaatgccaaggaaaaaaagtgcaacagaaaaaaaacgttgatattgcaaaagtttcttttcggatattacagtctctacattttactcagcgagactctacaaggttgacctaaaaaaatattatattctagtttcccaagcataggtatactactcgtcaatgactacgtattcaaatgcttcttccaaatttctgtaaataactagcaagcgtttgctgcaaacgatcggacaagtttactttgataacgtttttcaacgttgga

SEQ ID NO: 2800 - DNA, 383 bp, Cyanidium caldarium
  Clone ID: LIB190-054-Q1-E1-H11
aaaaaaaaaaaaaaaataaaaaaaaaaaaaaaaaaaaaaaaaaaaaaaaaaataaaaaaaaaaaaaaaaataaaaaaaaaaaaaaaaaaaaaaaaaacaggggggtcccccttggggtttcaatgttttttttcctgtggggttggtcttgagactttttggggcgttcctcttactttctattctgggcctgtctttttacatcttcctactgggaaaacccctggtgtttccccttttacccgcttgtgctgaattccccttttcgcgggatggttgtggttcttatagggctttccctgttttgcctttccaatccttttgtccacctgtgatgggaaatgggaacccccccttttttggcccttttcccccgtggggtt

SEQ ID NO: 2801 - DNA, 359 bp, Cyanidium caldarium
  Clone ID: LIB190-054-Q1-E1-H12
aaggacggtgctagtgctgctctttggacttgccgcctatttctctatacagttgtgttagcattttcagcaacaataattggacgtgatggaaagaaggcagataacatatggaacgatgccctagattatcatggaaaagtggtgaacttttgtgcatattcggcttcgtcagtttttgaaagtggcgaccatggcgcatgtaaatatgtgatggctttggcttctatcagcttgattttagttttctttcgttggttggcctccattgtcgacgcattgtatccaattcttacaaagttctggtttgtggagcttggtatcaagatattccttactatgtagtggatggttggtgc

SEQ ID NO: 2802 - DNA, 281 bp, Cyanidium caldarium
  Clone ID: LIB190-054-Q1-E1-H4
ccacacgtccgcccacgcgtccgccttcctacaatcaatattcttcttcgtacggttcctctagctatcgtctcttaactgcagacgaaaaccaacttgtgagcagaggaggttatgcaccaacaaaccaatgtattctagttcctatccaatgctgcactgattgcaaacaatgctacgccgcatggagttcctaaatactgatacagtgctcggatagaaagaaacaaatatcaacggatgtttgtttcttttacgtgaataaaacttgtgttcataac

SEQ ID NO: 2803 - DNA, 334 bp, Cyanidium caldarium
  Clone ID: LIB190-054-Q1-E1-H5
cccacgcgtccgcccacgcgtccgatcgctataggaaagtgagcaatacagtcttcaaggcaacagctttaacgttgtcgactgctgcagtaattggaaacctatacatattcgcaaacttgctcagcatagtttcctacagaagttcaaagaaggagctgacggaagccagtagtactcaggaaaactgagaaacacaagttgtcttcacgtctggaggatggaaatattatctgaagctaggctgggggtctgttccttgtagaagctctggtgttttgagaacttgcaattgttttgttctttgtagtaaagaaattgtcttcttttttct

SEQ ID NO: 2804 - DNA, 377 bp, Cyanidium caldarium
  Clone ID: LIB190-054-Q1-E1-H6
aggcttcgggctataaacttaagatgttggtgattatctttgaaatgggtgtagctttccactccgtaattattggtctgaatcttggaataagcacaggatcgacattccgtacgttgtttgctgctctcgtatttcatcaattctttgaaggatttgctgtcggtactactgtttctgaagcccagtttggcacttggattactatagtaatggtactttgctattctttggaaactccaatcggtatatctattggtattggtattgcacacacttatcaagaaaactcctcggcatctttgttaacgagaggcattttggatgccatctccggtggaattttaatatacacaggattggtggagttgttgact

SEQ ID NO: 2805 - DNA, 413 bp, Cyanidium caldarium
  Clone ID: LIB190-054-Q1-E1-H7
agcccacgcgtccgcccacgcgtccgcccacgcgtccggacaaagcctaatccgaaacaaggcatttctcagatgaagtggagttttgatggaaagtatttggcttcttgtaatgaaaacactccgcatgtcctctggatttggaatgttcttgaaatggaacttgaagcagttttgatatgtcagacaactattaagacaatacagtggaatccatattgcttacaacttgcttttgtgacaggttccgaatatctatttttatggaattctcaaggtgctgtcagtgttccattaccctttcctgagttttatccgcagtattgtacttggcctttgcaagagaaagggacacttttgcttgctgacaagagccaattctgcctcgccatggaagaagaataaagctgcaa

SEQ ID NO: 2806 - DNA, 382 bp, Cyanidium caldarium
  unsure at all n locations
  Clone ID: LIB190-054-Q1-E1-H8
agctgacgcgtgggggaaacgttaggctggaggttggtaatagattactcattgtgcttggcctgaaggacgatgagcactatctcggtttctctcaagaaacccggatatgattcctttctagggtttgttcctatacaatgtattggcttgtcaccaatgaaactattcaatacgtgttgtgctcgaccgatgagagcttggacctctccaaccaccataaagtgtatccaagacaacctccatgagtgggttcgttgtaaagtanttcgttgtggacaaaaacatatatttctaggccctatcaacagcttaactggttccaaggcactgcctatcgaaatanaaagccaactggatgccgacttgttgcgttctgcac

SEQ ID NO: 2807 - DNA, 373 bp, Cyanidium caldarium
  Clone ID: LIB190-054-Q1-E1-H9
agcccacgcgtccgcccacgcgtccgcccacgcgtccgatgcagcccatgtacagtagcagagaaaggtatccatattatgacggtgaagtatatgatgacacgggtgttgttcccccggaaacgaggcccaaaggaagacgtgtcatagtagaagagccagaagagtacggaatgccgccaggggacagagatgatagcgaagatgacgagcacattggtggttggagaagaagagagcagcacagcatgcagccttgggaccagtcaccttttgaacattttgacagacttttcgaaaatcccttttctgcaatggagagaggaggattcggtggattatttggtaacttggaacagtccttaagaagact

SEQ ID NO: 2808 - DNA, 378 bp, Cyanidium caldarium
  unsure at all n locations
  Clone ID: LIB190-054-Q1-E2-A1
cggaaaaaggggtggatcacgtaaattaagccgatagaaaccgagaaccttacctctcgcaagaaggtggtgcacggctgtcgaaagaacgtgctgtggagtgagagaacgtacgagaaagccaagtgaggaaaagaacgcaagtagacggcggcccgagaaaggagagggcgtgggacgtgatacagagtacgaagaaaagagaagagagctacaaaggaggtaaaagaagaggtggggaggacgaggggagggagcgggggggcacgaggaangatcgtgaaggaaggaggaatcccaagtaatcgacgaagaaaaagcttcggtgaaagcgtgaaccgagtttgtacacactgcccgtcaagttctgggagtgtg

SEQ ID NO: 2809 - DNA, 435 bp, Cyanidium caldarium
  unsure at all n locations
  Clone ID: LIB190-054-Q1-E2-A12
aattcacgggctaccgtctcggttatattgaagaatcattttccggaatgtgagcaacaactagagcaatggttggtggatacctgtgggatcaaggaaacgggtgaagatttttatatgcgttggaacgagcaacacatgtcttggttgcaacctttggaagaaagtcaacgacaatggttgcaaagattgtattccacagcaccgattgtacaattgcaagggaagatagaggagttggaagatattcggattcaagtgagttggaaagtatcgctatcctatgataagcaacgcagtctttggtggaatcagaatagcaacaaaagagccagtcgggaaacttggtatattctactggtaaataccaacactgggaaaataagtgcttttcgaagagttgcgtcnctgaaaaaacaggtgacaaggacattg

SEQ ID NO: 2810 - DNA, 395 bp, Cyanidium caldarium
  Clone ID: LIB190-054-Q1-E2-A5
agcccacgcgtccgcccacgcgtccgggatgccagccttattggtacaagtagcctattgtattcatgatgtgccacctatatctacctgtgtacgcactatgttctccgagttttggagaagtcatcacgaggaatggcccaaacaaaagcaaatgttgcgggccgatcaaagagaagcgttgaatgaattgctcatcgcaccaagttattatgcttgaagcgttgcgcgcgcgccagggaagccaggctcgtggcatttttttttaaaaaaagaaaaaagacgaaaaaaaaaaaaaaggaaagaaaaaaaaaaaaaaaaagaaaaaaaacacggaacggagagggcgaaaaaacgaaaaacgcggggaacgcaaaaaaaaagggggggccccc

SEQ ID NO: 2811 - DNA, 167 bp, Cyanidium caldarium
  Clone ID: LIB190-054-Q1-E2-A8
gcgccgtcgtggggtttttcgattcgtgtcggcagtgttggctgagaataggaaaacatgacgagatattccaaggaaccagagtaaccgacgaaaacttgcaaagctcgtggttcggatagtcccgtgcacgttaaaaacacgcgaaaaaacggacgtggtttgaa

SEQ ID NO: 2812 - DNA, 216 bp, Cyanidium caldarium
  Clone ID: LIB190-054-Q1-E2-B11
gtcagcgaaagaggtctatgagtagagagatacgtcagagtagaatagaaaagccgtactgaagaccgacacaggtactcgatgagaaaagagacccaaattaacgtgagagaatggacgataacgaactacgcaaaatgatatggtatctgcggtagaacatatgaaagaagcagcaccgactgtttagccaaaacacagcactctgcagaaaag

SEQ ID NO: 2813 - DNA, 382 bp, Cyanidium caldarium
  Clone ID: LIB190-054-Q1-E2-B2
agccacaacaagcatcagaacaaagtttgggtggttccgcaccgttatgaccgcttcgaccagaacaggagtatgtgaacaacaaagggaaaccaagaagaagagtttgcaaggaatcaacggaagagaaacatccaacgagacacaagttgaatcatgcaaaaccacgagatggcggagattttggaagaagaggaaatcttcaagttactagaagcttttagaaagtagttgccacgggcagccagcagcgtgagagctcaagaaataattgaagtacgtatttgcatcccttggcttttgaataattcacaggagaaagagtaagtctggtaagttctttacggagaaagaacagtgggagctgtgggaaaacgttttg

SEQ ID NO: 2814 - DNA, 328 bp, Cyanidium caldarium
  Clone ID: LIB190-054-Q1-E2-B4
caacatcatcaaatgccaaagggaggaaagaaagattcttcaaagaaagaagccacaagtaaacctgcatcagcagatgctacaaagacgacagaaaagtctggtccggaagccaagttgaagggaactggtgcaaagaaacaataaaaagttgactatgcatgtgcagtcctgtgatgttttgtgagttctgtttgatagtttccagctattcttttggtagtgaataaagagaagatttttgtagatgtagagagggaaaaagaaaaaaaaaaaaaaaaaaagaaaaaaaacgaaaaaaaaagggcagccgcccaaaaggatccaa

SEQ ID NO: 2815 - DNA, 411 bp, Cyanidium caldarium
  Clone ID: LIB190-054-Q1-E2-B5
gaaataataaaagagagagagcaacgacgacggagaagatgaggttatttcaacgttggaaaagaattggcaactatttcatctactcgcagtactctagtcgaccgaatagtttatttcaagcagaccctaggaaatataatatatatttacagcatcgggtggagaaacacctagttgcccattctatggttgcagcatccctacataatcctcgctgtcttacgagttgttcgtgaggagagcaacattggaaccaagtacacaaaacaacaacaacaccaagtgtggataatcatcctagtcgtgaagaagaaaagagtttggtactcgttcctggtcaagagacaaaagaagaacaaggagccaagcgacagagtcttcgagaccgaatattttcaagtttttccg

SEQ ID NO: 2816 - DNA, 376 bp, Cyanidium caldarium
  Clone ID: LIB190-054-Q1-E2-B6
agatcgttgttgagatatgcaaacttccctcgcattctcttgttggacaccgttgcagcgaacttcaaagaacgtagtttgctcgtctagtttttgcaaaaatagctctattccgttccatgctaccaacagaaggagttgtgtttttccgctgtcttttggtggagcgcctgtcgttagttataagtgggaagtggctgcaaacctgcagcgaaggcagtttgggtcagtttcgatggaggtgcgtgttgacgtaggtgaaggtgaacctatcgattctgctatagcaaggtttcggagagaagttagcaaaagtggtcacttgtttgagctgaaaagacgacaagagtttgaacctaatagtgtgaagcgacaa

SEQ ID NO: 2817 - DNA, 401 bp, Cyanidium caldarium
  Clone ID: LIB190-054-Q1-E2-B7
agcccacgcgtccggtgttagtccatgtggtggtagaggtagttggatggtttatgttggatcctttccattgtgcacttctccaaagtttctgtggtttcgcgacttttgtaagtataaaaggactagaaaaagtccccatggtggttccttttggtgcggttcgaaggaacctctttccgatggcgccaagatcacgagtaggagaaacagcagctcattcaggtggaagcctagtgtacgggttcgttttgctaagaaatggcttccttcgaaggaaattttgggacagtggagagactcggagcacgtgacacctgcggcagggcggtcttcacttcttgggaatagaagattggctgttctagaatatacacaagatatattgaaaccacttcaga

SEQ ID NO: 2818 - DNA, 409 bp, Cyanidium caldarium
  Clone ID: LIB190-054-Q1-E2-B8
agcggacgcgtgggcggacgcgtgggttttcccaacagaaaatgtacacaaacagtgataatctagaagaatacaatcaacttgagaaaaaggttcaagtaatcacaacttgcatctctatctcatatcatctttctatcatggaccaagtcgatgcattcggtgcattgttgttgtgttgcttcctagaaaaacttgttgagagtgctatgaactgtttgccagggagggaggacggcgggggtgcaatgcccatttattggttggagatccaagcgtcgtgttctgccaacgtacaaaggataagcgtccatagcaactatatatggcacttgcagctacaatgtatgcaatgtagtgaaaaaacggggtggattgcagtcgatcctttgcaggaaacgacaagagt

SEQ ID NO: 2819 - DNA, 391 bp, Cyanidium caldarium
  Clone ID: LIB190-054-Q1-E2-C2
acgcacgcgtccgcccacgcgtccgcccacgcgtccgcgatgcggagtgggacatgatttacgacaagttcgaaaaaatcgtcgctacaggtgccaaagttgtacttagtaagttggccatcggagatttagctacgcagtattttgccgatcgagacatattttgtgctggtaggtttccagaagaagacatgaaacgtgtcatgaaagccaccggtgcaagcatgcagtcgacagtgaaggggcgaagtgaggagtgttctcggtacttgcgcattgtttgaagagaagcaagttggtaatgaacgttacaactttttcactggttgtccatatgctagaacagcgacatttagtattcgaggtggttcggagcagtttatggatgaaa

SEQ ID NO: 2820 - DNA, 227 bp, Cyanidium caldarium
  unsure at all n locations
  Clone ID: LIB190-054-Q1-E2-C9
gaaaaagcccagaagccaagataaggtatcaaagtaaagaaagaaggaaaaggagaagaagagagggtangcttagaagcagcaaaccagagaggaaaacgttaaagcatgaaagaaaagaaatccgaaaaagaagagaaaaaggtaagaaagaggaccgaatcanggtaagaggtanaggagcaagaagagaagagagaatgctgggtggagtagcgaaacaagag

SEQ ID NO: 2821 - DNA, 196 bp, Cyanidium caldarium
  Clone ID: LIB190-054-Q1-E2-D12
gcgtcagccactacatgaggattaggaatctaactgaataaggaaaacaagcttaagctagtttagctggggaagtaaagcctaagaaagagtaaattatgcaagcaaacgcgggagagaagtatactagcagaagcattcttggggaagtagatagagatttcagacacggaataaaagtctgctatcgagaaca

SEQ ID NO: 2822 - DNA, 377 bp, Cyanidium caldarium
  unsure at all n locations
  Clone ID: LIB190-054-Q1-E2-D2
cggacgcgtgggttttgcacaaaatattcgacgtcgccattgagcagccgtgagnggacgtgtaatacgaggccagagaaagggagccggtagtgtagttcgtgggcatgtcgtcaaaagaaaaggagcagccaagtgtagagcgttggattatgccgaaagacacggatatgggagaggagtcgtcagggaaatcatacacgacgcaggaagaggagctcctttggcgcgagtggagggtgagggatgggtagagagataagagaagagtagagacttttatggcaccagaaggtttatatacgggacaattcgtgtattgtggaaagaaagcccaactagcaatcggtaacgtccttccacttggttccttacct

SEQ ID NO: 2823 - DNA, 396 bp, Cyanidium caldarium
  Clone ID: LIB190-054-Q1-E2-D5
agcccacgcgtccgcccacgcgtccgggtgtccactcgtcgacgaagagctataaggtttcaagtggatgacgagaatttacgtgcaactagcagacttagtgtcggtgtacaagcaatttttttgcaacctggtgattgcctagccgatgtggatgtcatgtgcatcgtcatggctccaaaagggatcctcggagttgtatttcttggcagttggcagagatggaacaggagagagagtaggaggattagatattccggaacgaaaacgatatcaagtaggagtttatgtgatgaagtttgatcggaagaaggaaccgaaagaagagcttcgatttttccgtgcgtgtcgaagcgatgaagttgtgttgtgcaccaacacaggaagaattgtacg

SEQ ID NO: 2824 - DNA, 369 bp, Cyanidium caldarium
  Clone ID: LIB190-054-Q1-E2-D7
aggttggaattgaaaggagggtcgacgagctcagcttgaagaagcgagaacttgcgtggggttggacgttatttatgaacttggactctaaggacagatgaattaatgcgccttttgacccgtgtgcagacgcctcacctggatatgacgcaacagtatcggaaaatataatgcagattcgcttgcaagatagaaatcgacgcaaatacatgacgacgagtcatgggcgtgacaggcgagtggggtttgaataaaattacaaaggccttcaaagaggagttttgttgcaatcgttgtgtcgtatacgacgcacaactgggaagagtcatccatctgcaacgagaccacagggattaagtcaatcagttt

SEQ ID NO: 2825 - DNA, 410 bp, Cyanidium caldarium
  Clone ID: LIB190-054-Q1-E2-D8
agcaaaagtgcgagcaagtaagactcgatattactagaagtgaagcgtacgttgcagttcacgttgaccaagctccaagatctgaaagcagccgcattcaacagagatacgacgcacagagagaagcggaagcaagtgaacggagttgacgaagaaatggaagctcaagaatggctccactggatagagacaaaggcagattcgtcaacactcgcatcattgaggagcggggtggaggcgagaggggaagaccagcaatggacttttctgtcctcccttttagagaaagcctattccaccgtcaacagcgaagatttatcagccgaatcctgctcagtgcaacagcttattcaaaagaaagacgaagaaatagcttttttgcggcaacgactagccgaagttgagcaagc

SEQ ID NO: 2826 - DNA, 169 bp, Cyanidium caldarium
  Clone ID: LIB190-054-Q1-E2-E10
cagtttgtatagtttggccactgcatcctcacatgcatgaatagcgcgtacaacacacacgattctggttccagctttggaaagcactcgctttgttccgtgaacacatgtcgttgattcacaccggcaacacaacttaaggaacttggactccacatttgaaagtccc

SEQ ID NO: 2827 - DNA, 365 bp, Cyanidium caldarium
  Clone ID: LIB190-054-Q1-E2-E2
cccacgcgtccgagaggtgtatgatgcaggcgaagaagtgacgcagtaggtcagggacgaagacatgcaggtaggtaaagcgaacgggtgagtaaagaggtgtgagggagtggaagaacatgagagcacagaagaatgtaagaaagggttagagtaaaaaccataaaggaagtgggagcgggaatctgagaggaggaaagccacagtggaactgacaaaaggtccaaacgagagaagtcgggggtgggcgacgacgggggcaatgtacagggaagtatgacccagtgatgaggactggagtaaacagaaaaggaagtaaaaggagggaatgaagggaagttatggcaaaaacacgtgccagcagc

SEQ ID NO: 2828 - DNA, 350 bp, Cyanidium caldarium
  Clone ID: LIB190-054-Q1-E2-E5
cccccccccccccccccaccccccccccccccaccccccccccacccaccccccccacccccccccccccccccccccaccccccccccccccccccccccccccccccccccccccccccaccccgcccccccccccacccccccgcaaccccacccccccacccccccccccccccccccccccccccccccccccccccccaacccccccccccccccctccccccccccccacccccccacccccacccccccccccccccccgcccaccccccccccccccccccccccccacccccccacccccccccccaccccccccccccccccacacccccaccaccccc

SEQ ID NO: 2829 - DNA, 251 bp, Cyanidium caldarium
  Clone ID: LIB190-054-Q1-E2-F2
ttccttcagctgagctgagacagagacgtgtacatagtgacttgcggaaatccatccaactgcgcggaacgttatcccgaagaacactggatatacgtcggtttattggattgtttagagcacgttagtggggggcgtggcgggcgggatccagagtgcacggactaaactttgcctctgatgaacgctggttccaaatatgaatatctttggcaagacaacgaccaacataagaaatcaaccacagtttc

SEQ ID NO: 2830 - DNA, 395 bp, Cyanidium caldarium
  Clone ID: LIB190-054-Q1-E2-F6
cccacgcgtccgagaggggattggtgggtcacgaacgagaggatgttgttcttttcgtttttcaaaacgtttatcggcaaaagagttacagtagaactcaaaaacgatgtaattattcgagggaaagtacattcagtggatcaatatctaaatatcaagttggaagatatagaaatactcaatatagaaagttgcccacagttgatgactttgaaaaattcgtggaggggtgggggtgggaggaggtatattcaagtatacgctatcgacgtcgactgcgagatgctacaggaagcagccagaagagaatacaaggagttgaagaaagtagccaaatagggcgcaagacacacgttaccattgtctatctatccacggcgtgatgaaccaactgc

SEQ ID NO: 2831 - DNA, 401 bp, Cyanidium caldarium
  Clone ID: LIB190-054-Q1-E2-G1
ctcagtcagaactgcttctcagttagttacgcaatatgcctagtcataaggaacaaaatagaggaattaaaatatcagctgacggttacgcactaaagttgagcggtattcggttggacgtagacggcagtttggtcactatggtggacgcagacgacctcagagccctcatgtgtaaggaaagcctcaaggaaaagtcaaagctgcatgacccaaaatttttcaaaagctagtatgaggaggagaaggagtacgtggtattatatgactcatacggagaagaaaatgtttctttctctggaagttgcacgagaatacgctactctggtgggaaactcgtttctgcagaaatatttggacaaagtcattgagcacgaacacgcatactaagggaaccaacg

SEQ ID NO: 2832 - DNA, 387 bp, Cyanidium caldarium
  Clone ID: LIB190-054-Q1-E2-G5
caaatggcgtcctttcgacgcaggatagcctcgctgtctttgtgacatgtagaggacaagtcattccacgtttttccaaagtatttagacgcgttgggaaaacttttgtccagagcaaggccgtcgaccgtgtgacggatgtgttggatatgtcgttagggcaagggccttgtggttggcgttatatgacgaatttgatggataaagacaagtcgagggtggggtggaggagcgggagggttacgttgtagttggattcgtgaaagagacgggttgtttttggtgctttgttggttaagtttgttgtcttggaaaaatgaaaatcgatcagagtggatgagcatagaggatgtgatggaacaacattggaacatgtatggggaaaga

SEQ ID NO: 2833 - DNA, 385 bp, Cyanidium caldarium
  Clone ID: LIB190-054-Q1-E2-G8
gagcccacgcgtccgaattttttttggttccgtttcgcatgtcttgagcagcagttcgttcgcaggcagaaaaccaagacactcgacgtgccaaggcactaaaggagtatcaaagagtagtctcccagcatagagatattgaaaatagagtgcgaaggcttcggcgaggaagtgaaaactctcaagcaacaatttgagaagacggaagatgacttgaaagcttggcagagtgggcgcgcgggtagtggggaagttcttcgagctattgatccggagaaatttagtgtgaaggcttcaagtggtccacgttatgtcgtcggatgtagaaacaagatcgatagagataagctcgtacagggagcacgtgtctctttggatatgacta

SEQ ID NO: 2834 - DNA, 384 bp, Cyanidium caldarium
  unsure at all n locations
  Clone ID: LIB190-054-Q1-E2-H1
agaaaatatgatacgacgaaaatgccaaggaganaaaagtgcaacagaaagaaaacgttgagattgcaaaagtttcttttcggatattacagtctctacattttactcagcgagactctacaaggttgacctaaaaaaatattatattcgagtttcccaagcataggtatactaggcgtcaatgactacgtattcaaatgcttcttccaaatttctgtaaataactaggaggcgtttgctgcaggggatgggacgaggtgactttgaataacgtttttcaacgttggattatttgccacaacttcggtaacgttattgatgagcaccttgatagaaagatgagataatacaaagcgctttttcaataaaaacatacttggtctg

SEQ ID NO: 2835 - DNA, 331 bp, Cyanidium caldarium
  Clone ID: LIB190-054-Q1-E2-H10
gaattaaagggtcgacgcacgcgtcagcggacacgtgggcggacgcgtgggcggacgcgtgggttcctagtggtatgtttacagaggagattgatcgatatactggtttcgagcaaggagctatcaatttaacttggagttatgatgcctttgttactgcggtttggtcaagagaagatgttcacaagttgttttctaaatattgtgaacctccttctccacctctacctagtatgccaggacctggtggtttatcttctccataataagaggcacttgtgcactttggatatttttgtggttcacataaagacaagctttattaagaagc

SEQ ID NO: 2836 - DNA, 223 bp, Cyanidium caldarium
  Clone ID: LIB190-054-Q1-E2-H11
cgtcagaaaaaaaataagcagaacacataagcagacacaataagttcctaataataagtttacaaaaagaaattgatcaaaataaatgagtttcaaacaaagaaaaagggggtctaccttaaagtttctaagcttttgttacctcgagtttggtcaatataactctgttgaggtgtccccaactttcaattctggggccccttttttaaatcttcctactggg

SEQ ID NO: 2837 - DNA, 411 bp, Cyanidium caldarium
  Clone ID: LIB190-054-Q1-E2-H12
gcgtcaggcattaacaatcatgggagacactaagcttaaggacggtgctagtgctgctctttggacttgccgcctatttctctatacagttgtgttagcattttcagcaacaataattggacgtgatggaaagaaggcagataacatatggaacgatgccctagattatcatggaaaagtggtgaacttttgtgcatattcggcttcgtctgtttttgaaagtggcgaccatggcgcatgtaaatatgtgatggctttggcttctatcagcttgattttagtcttctatcgttggttggcctccattgtcgacgcattgtatccaattcttacaaagttctggtttgtggagcttggtatcaacatattccttactatgtggtggatggttggtgcaattgtggtgactgc

SEQ ID NO: 2838 - DNA, 405 bp, Cyanidium caldarium
  Clone ID: LIB190-054-Q1-E2-H2
gggtcgacctaaggtccggtgcgaaagaggacgtaggacggcattgtggaagagcgttttgggtcctggagagctcatgtggagaacaacgattgtatccttgttaagaagaaaacctagtcaggggttattgaagagaagttttgccgatcaagttgctcaaggctcagaaaaactaaaacttgggtttgcgagcacctacacatgcccttcgaaaggatgctctcgtggatatggtagtgttcccagcaggtagtgggagggtgggggtagttcggtcaacatgtgcctacagttgctcaactgaaacctggtgtggtgactgtcgtagaagatggcaaggaggacaaatattttgtgagtagtggatttgcctttgttaccaaagaacgaacagatattttg

SEQ ID NO: 2839 - DNA, 399 bp, Cyanidium caldarium
  Clone ID: LIB190-054-Q1-E2-H3
agacttggtaaaataaagcaaggagatccactcaatttggagactatggtgggagctcaagtatctactgaacagatggataagattcttcactatgtgcaattgggaaagaaggaaggtgctcagtgtattgttggacgaagtggaaagaaagctattggaggtgatttagaaggtggctattacattgaaccgacgatattcaagggagataacaagatgagaatattccaagaagagatatgtgggcgagttctgagtgtcacgactttccgtacagaagaagaagccatccaaattgccaacgatacttcgtatggtttaggtgctggtctgtggactcgagatattatgaaagcttatcgcgtatctcgagcaatcaaggctggtcgtgtttgg

SEQ ID NO: 2840 - DNA, 283 bp, Cyanidium caldarium
  Clone ID: LIB190-054-Q1-E2-H4
cgcacgcgtccgcccacacgtccgccttcctacaatcaatattcttcttcgtacggttcctctagctatcgtctcttaactgcagacgaaaaccaacttgtgagcagaggaggttatgcaccaacaaaccaatgtattctagttcctatccaatgctgcactgattgcaaacaatggtacgccgcatggagttcctaaatactgatacagtgctcggatagaaagaaacagatatcaacggatgtttgtttctgttgacgtgaataaaacttgtgttcataac

SEQ ID NO: 2841 - DNA, 382 bp, Cyanidium caldarium
  Clone ID: LIB190-054-Q1-E2-H5
agcccacgcgtccgcccacgcgtccgatcgctataggaaagtgagcaatacagtcttcaaggcaacagctttaacgttgtcgactgctgcagtaattggaaacctatacatattcgcaaacttgctcagcatagtttcctacagaagttcaaagaaggagctgacggaagccagtagtactcaggaaaactgagaaacacaagttgtcttcacgtctggaggatggaaagatgagcggaaactaggctgggggtctgttccttgtagaagctctggtgttttgagaacttgcaattgttttgttctttgtagtaaagaaattgtcttcgtttttctaaaaaaaaaaaaaaaaaaaaagaaaaaccgacaaacgagacgcgac

SEQ ID NO: 2842 - DNA, 404 bp, Cyanidium caldarium
  unsure at all n locations
  Clone ID: LIB190-054-Q1-E2-H8
agcggacgcgtgggggaaaggtgaggcgggaggttggtaagagagtactcattgtgcttggcctgaaggaggatgagcactatctcggtttctctcaagaaacccggatatgattcctttctagggtttgttcccatacaaggtattggtttgtcaccaaggaagctattcaatacgtgttgtgctcgaccgaggagagcttggacctctccaaccaccatagagtgtatcggagacagcgtcgaggagtgggttcgttgtaaagtatttcgttgtggagaagaacatatatttctaggccctatcaacagcttaactggttccaaggcactgcctatcgagatanaaagccaactggatgccgacttgttgcgttctgcactcggattctatcgcaagcaaag

SEQ ID NO: 2843 - DNA, 419 bp, Cyanidium caldarium
  Clone ID: LIB190-055-Q1-E1-A10
cacgcgtcaggtaggtgtgctcagtcagaactgcttctcagttagttacgcaatatgcctagtcataaggaacaaaataaaggaattaaaatatcagctgacggttacgcactaaagttgagcggtattcggttggacgtagacggcagtttggtcactatggtggacgcagacgacctcagagccctcatgtttaaggaaagcctcaaggaaaagtcaaagctgcatgacccaaaatttttcaaaagctattatgaggagaataaggactacttttattatatgactcatacggagaaaaaaatgtttccttctctggaagttgcacgaaaatacgctactctggtgggaaactcgtttctgcagaaatatttggacaaagtcattgagcacgaacacgcatactaagggaaccaacg

SEQ ID NO: 2844 - DNA, 412 bp, Cyanidium caldarium
  Clone ID: LIB190-055-Q1-E1-A12
agcccacgcgtccgcccacgcgtccgatttcattccgtgtttttggtaccatttgttgaagagattcaagtaaggaatttgggatttcgttttatgacactttggttatgtggtcggtcatcagaacttagcaactggcttctcgatgtttcactttacgaattttgctggccttcgataataatcatctctctaggatttggttgttgccataccagatatgagtttgaatggttagctggatttctttatggactcatggttcaggtggtcgctataaaggataaaaatgtcataaatgcaatccagtccactgtatcacaaacctttgtttaaatgtttacattttgatgtctggtaacttttatttgtggtagtttgactttgcaaataggttttcactatttgtttg

SEQ ID NO: 2845 - DNA, 434 bp, Cyanidium caldarium
  Clone ID: LIB190-055-Q1-E1-A2
agcccacgcgtccggacaaaaatagatagacagaacaagactgttgatgtcagagatttggagaaaaatacgagctaccaggagaaatatgattatcttctcctttcaccaggtgctgaacctattcgtccgaagctggaaggaatcgatctagatggcgtttactccgtaagagacatacctgatgcttcgcatattaaagaatggattgccaaaaataatgctaaaagtgcagttgttgttggaggtggctttattggtttagaaatggctgaaaacttatctcttttaaatttaaaggtccatgtagtagaagctctttctcatttgatgcctgcaatggatcccgaaatgttgcctccactatacagaaagatggaagagcatggtgtggacataatttttcatgatggattgaaaagtatagtgaagga

SEQ ID NO: 2846 - DNA, 426 bp, Cyanidium caldarium
  Clone ID: LIB190-055-Q1-E1-A8
agcccacgcgtccgcccacgcgtccgaaacacaagacaacaatgtctcgtcccaagtgtttctttgatattgctatcggtggacaacctgcaggaaggattgtattcgagttgttctccgatgtcgttcctaaaaccgcggaaaatttccgtgccctgtgtaccggtgagaaagggtttgggtacaaagactccaagtttcataggatcattccccagttcatgtgccaaggtggagactttacacgcggcgatggaaccggtggcaagagtatttacggcaccaagtttgaggatgaaaacttcaagttgaagcattcggagccctttttattgtccatggccaatgccggaacgaataccaaccgaagtcagtttttcattacggtagtgaagacaccttggttggatgggaagcatgtggtgt

SEQ ID NO: 2847 - DNA, 331 bp, Cyanidium caldarium
  Clone ID: LIB190-055-Q1-E1-A9
acaacatcacattgaaacacttcgaggacacgaacaagaagtttgtgggttgaaatggaacgtcgatggaactcagttggcttctggaggaaacgataatttgttgatggtttgggataatcttcactccagtcaaccaaaatatcgtttagatcagcatcttgcagctgtaaaagccattgcttggtgtccttggcaatctcatttacttgcaagtggtggaggaacagcagatagaacgatcaagttttggaatactacaactggctcctgtttacagtccatcgatacaaaaagtcaagtatgtgccttgctctggaatagacatgat

SEQ ID NO: 2848 - DNA, 418 bp, Cyanidium caldarium
  Clone ID: LIB190-055-Q1-E1-B1
agcccaagcgtccgcccacgcgtccggtcaagtggtacagtcggaacaagacctgaaaagctgtttggaacttagaaagctaatattcgttcaagaacaaggagttagggaagatagagagcaagatgaatacgatcgagtggattcaaccgttgaaagtttgggtcccagatggaaagttaaacacttcataacctggttaggtaaccaagtgggtgcaactggtagagctcgtcgtaattcgatgtttggaataaagttagaaagaattgctgttcgaaaagaagaacgtataaagcacattggcgaaacactgcttcaatttatgttgagagaaatacagaagaaaaatgcggctattaatttgcactcgcagaaccctgtggttacgttttatgagagtttgggcttttcaact

SEQ ID NO: 2849 - DNA, 115 bp, Cyanidium caldarium
  Clone ID: LIB190-055-Q1-E1-B3
caggtatcaccctaagctacttgatcttatgctgtccaagcgaagtaatgctgaaccaatatctgtggcaaattatttgcaagatatcgcataaagcttgagatgccactcaatc

SEQ ID NO: 2850 - DNA, 423 bp, Cyanidium caldarium
  unsure at all n locations
  Clone ID: LIB190-055-Q1-E1-C10
ccacgcgtcagtcaggaagcgatgaaagtggaaaatttatgtcaaggttatatccgctggtgtgccttttggtaacgcttggtggtacaccaaaaccagagtatgtcaagtagtgggaaaaaaagtattctcctaccgaaccatctcaatgtggagaaaccaccctgttgtccatcgttgaaaacgatatgtctccactggattgctcgaaatactgcacgcgtaggtgaactgggggatgtaccggatgagttgatgtacaaagttggttgtttatgtggagcaaaagacttggcaagactggaagacaacaaccctggaagagaagcagtgtntgaagcactgtgggcagcgttgttgaagcgagattttagtanggaagaagggaatgaaagcccatcacaacaccaccatgtggcaagt

SEQ ID NO: 2851 - DNA, 141 bp, Cyanidium caldarium
  Clone ID: LIB190-055-Q1-E1-C3
catcatgcattgtagagtttgcatgtgctatatcagtaacaatcgactatagatacttaaagtcatctgcacacgtggttatcggatgccatggaaggcgcagagtccactgacgtgcatttgattcatggatcgacgtta

SEQ ID NO: 2852 - DNA, 287 bp, Cyanidium caldarium
  Clone ID: LIB190-055-Q1-E1-C5
cggggcgacccaagcgtcagaacacgcgtccgcccaagcgtccgcccaagcgtccggataattttgtaaataaagtcgtaattttcctttcaaaaaaaaaaaaaaaaaaaaaaaaaaaaaaaaaaaaaagaaaaaaaaaaaaaaaaaaaaaaaaaaaaaaaaaaaaagggaggaagatcaaaaggaataaaagattaggtaagaaagtaagaaaaagtgaaggtcttcaaagaggttactgaaaggaaattaacgggcggtagttaaaaaaagtcgggagggggaaa

SEQ ID NO: 2853 - DNA, 419 bp, Cyanidium caldarium
  unsure at all n locations
  Clone ID: LIB190-055-Q1-E1-D11
acgcgtcagcataagcaaatcattaaccggaggaaaagaaacaaactggaattcccctattatcggcgagcgaagcgggaagagccactatgagaatcctccttttcctttgtgaaaagaggagatgtatttgaaaaaagacaagaaatatctgcagcaagaaaagagcaaatttcctggaatggaatatcatggagggtgagaatcncgtttatctcttttctttgtattcaagctgcgttacgatattttttgttgtggagtcgggttgtttggtagtacagccttaattttgtgggtgttataaatcatccaaggctaaatacgtaaagagagaccgatagcgaacaagaacatgaggaagaaagaggcaaatacgggaaagcagtaaaagaagaaagagaaaggaaaaaactgag

SEQ ID NO: 2854 - DNA, 345 bp, Cyanidium caldarium
  Clone ID: LIB190-055-Q1-E1-D8
acccacgcgtccacctacgtctctgcagttgagtgaaagtgcgttgtatttggcaatgtttcaacggttactgacgtacttgagtgcaaatattctcacaagacattgttcaaagagtgcggaagtgacatttaaagttttacacgatcactttaacttttctttgagcatgaatgggagaaataacgtgtatgctgaatctgtttgtgtgtgaatttgaagaatgacatttcgcttctgctgatgtaatataatttacatggtttaagtttggtatgtatcatgtacagaaatcttcgtatcaacttacgtcatttctcgtacgatcttggtatagggatacca

SEQ ID NO: 2855 - DNA, 178 bp, Cyanidium caldarium
  Clone ID: LIB190-055-Q1-E1-E1
acgcgtcagggaaagaagaaggtaaaggaagagaaggaagaagcagagagggactatgagcgaaaatgtggatagtcgagagggaaaaagcccagaagccaagataaagtatcaaagttaagaaagaaggaaaaggagaagaagagagggtaagcttaaaagcaacaaaccagagaag

SEQ ID NO: 2856 - DNA, 405 bp, Cyanidium caldarium
  Clone ID: LIB190-055-Q1-E1-E11
aggacgggttgtttggtagtacagccttaattttgtgggtgttataaatcatccaaggctaaatacgtaaaccgagaaccttacctctccaagaatgtgttgcacggctgtcgaaagaacgtgctgtgaagtgagagaacgtacgagaaagccaagtgaggaaaagaaggcaagtagagggcggcccgagaaaggagagggcgtaagacgtgatacagagtaagaagaaaagagaagagaaccagaaaagaagttaaaaaaagattaaaagactaaaagaagtacggaattcacgaagaacgagcctgaatgaaggaggaatcccaagtaatcgaagaagaaaaagcttcggtgaaagcgtgaacggattttgtacacactgcccgtcaagttctggaagtgtgc

SEQ ID NO: 2857 - DNA, 426 bp, Cyanidium caldarium
  Clone ID: LIB190-055-Q1-E1-E6
agcccacgcgtccgcccacgcgtccgctcagtacttgtctgaattctgcagaaggaaatgttacggttgacttgtcgcggcagtgtagcttgaaggatatattttcattgaagcttctcgacaataactttaagttggcgtgttttaatgatgccttgtttttagttttaccaggcttatcctttgttattactggtaatcgtatattctgtagacgctcggacttgaatgaaacggaagcattggagtcctgcttttcgtttatgaagatatgccccacgtacaagtcgttggagattcttttggaaggcgagcaaatttatgtagaagaactcgtgcctattgtatttcgtttcgttgaagaacttcctcactttctttttgacaattggaaaaccgtaagttacggctctccctcgaagaagg

SEQ ID NO: 2858 - DNA, 155 bp, Cyanidium caldarium
  Clone ID: LIB190-055-Q1-E1-E8
cgtcagaaaattcattcatcgttgctcactcttgttgcatatatgacatgtcgtcgtagacgtggtaaacgtttatgataacgacgtgcataccgtcatcccatagtcttgggagacagtatccacggaataatcaaatcagctatccgtcgttt

SEQ ID NO: 2859 - DNA, 411 bp, Cyanidium caldarium
  Clone ID: LIB190-055-Q1-E1-F12
cgcgtcagcagacgtacaaaagttttggcacaaaaactgcaaaaccacaaacgctcgctacttgtattaacatgccttcgacgaatgccaagaacaaagttcccgatacgcgttcgggtatgggagaccccaaccaacctctaggtattgtagatactgccaagtcggaagagttttcccaaggtcctctttctttattggtggattgtgtgaaagatggtactccagtgttgatcaatgtgaggaataacaaaaagttgctaggaaaagtaaaggcttttgaccgtcactttaatatgattctagaaaatgtcaaagagatatggacagagataccaaagagtaaaaaggctagaccagtcaacaaggatagatttattccgaaaatgtttttacgtggtgactcggtag

SEQ ID NO: 2860 - DNA, 347 bp, Cyanidium caldarium
  Clone ID: LIB190-055-Q1-E1-F5
agagtcgattctcaaggaaagatacaaacatatgttgccaacagagaattactgctggatatgtgcatccactcaaaacctggggtagatgtaaaccaaaagaaacaacggttattgtcattcttagctagtcaggagccttgttatctgtgggaagaagaagatcgtcatcaagaaccacaaatagatagtttatatatctctagtgctgggtacaaggcgatcattttaagggacaagatgttgttggttcacaattggtcccttgatggagaacaacggtggggtgatggatgagaataatagttttgcatatttcatgtcttccagtttttatattatgtttg

SEQ ID NO: 2861 - DNA, 274 bp, Cyanidium caldarium
  Clone ID: LIB190-055-Q1-E1-F7
aacagtagcttagacagtaacatatgcttctaggttcagcgaacgggtgagtaaagaagtgtgaaagagtggcagaccatgaacgcacagaccaatgttagaaatggttagagtaaaaaccaatcatggatttatagcgggaatccgatacgaaggaagccgtaatggaactgaaaagttgtccaaacaagggaattcagcagtggggatatttggccaatgtacagggaagtatgacccagtgttgaagagtggagtaagcagaaagggaagt

SEQ ID NO: 2862 - DNA, 428 bp, Cyanidium caldarium
  Clone ID: LIB190-055-Q1-E1-F8
aggggatgtcgtcgcaacccgtcttagtgctttgcgacttccaaaatgatattatgggtttcgttccccctgagaagaaggaagccgtcattaaaggagcttcgaaacttttgaactttgcccgtgagaagaagatccctgtagttcatgtgggggtacgttttagaccgggacaccctgaagtttcgaaacgaaacaagatgctttctcttgtttcctccagaggccccatccttgtggaaggtactcctggaagtgaccacgtagcagagttgaaaccaattgaaggtgaattcagtgttacaaaaagaagagttggggcacattataataccgatcttacaaccattcttagccgcttggggcgctacccacctgattttgggaggtgtttctacaagcggagttattctgtcgaccgttcgttg

SEQ ID NO: 2863 - DNA, 439 bp, Cyanidium caldarium
  Clone ID: LIB190-055-Q1-E1-G1
acgcgtccgcccaagcgtccggtgcaacgatggagaaagtggcgaaggaaaaccgcttgaagaggtgcaaacagggaaactttttgcgttattatctgaagaactttgtaaagtatgtatactggaaaaagttaccgtgaagagtttaggccaacaagaattggcaactttttgtttcgtcaactccgccttggtctgcaaaatagaccttgaaagtcattctagagcgatggttcgcggtattttcagactcttgtttgggaaatatttctgtaacaagtttgggaaaaggaaaacaagtatttacttggttgtattctctgagaatggattttttgcggggaaacgacttgtcgggagaccaagttccaatggtccacggatcactgtgcaacaaatattgattgctatacgttccccatttgctgggttgttagat

SEQ ID NO: 2864 - DNA, 404 bp, Cyanidium caldarium
  Clone ID: LIB190-055-Q1-E1-G11
ccacgcgtcagtagatgagacgcttgaacgaaaactacggagatagacataccaacaaaacatcggcgacttgttccgtcgttccaagaaattgtgccgctgtggttttcaagctatttcgaaaactttggggcatcttttcaaaagcctttgtccaatcgcccgataacattcgttccatagctatctgttccagttggtcaatccaacgacccagcgacatggcacggtgctgataaaagtacgttggactcaaataaataaccaccaacaaaaaaaaaaaagaactaaaaagaaaacaatcaaaaaaaattcggaggaaaaaccacaagatcaaaacaaaaaatacagatgattaagacatcaaacaaacttctataattctaaaaaaaaagggggggccc

SEQ ID NO: 2865 - DNA, 458 bp, Cyanidium caldarium
  Clone ID: LIB190-055-Q1-E1-G4
cggtcaggaatatcgggccgagccacgcgtcaacccaagcgtccgaacccgtgtagtctatgcagtaaaagaaagaatgagtaagaaaaaagggagtcattccaccaggggagtaaaggcgcaagaaagaaacccaaagcaattgacgggaatcggaaaaaggggtggatcacgtaaattaatccgatataaaccgagaaccttacctctccaagaaggtgttgcacggctgtcgaaagaacgtgctgtgaagtgagagaacgtacgagaaagccaagtgaggaaaagaaggcaagtagagggcggcccgagaaaggagagggcgtaatacgtgatacagagtaggaagaaaaacttttagcaaatacacgaacaatgccaaaaaagaaaaacctctcgtcgtaaagaaaagtgtacagaatcttctatggataaacggaccaaggaaatatacttgg

SEQ ID NO: 2866 - DNA, 422 bp, Cyanidium caldarium
  Clone ID: LIB190-055-Q1-E1-G5
agcccacgcgtccgtgtgtggtgacttggatgaaaacttatctctttgttccgtcttgttcttgtctttctacaaaacttgcaagtggaaaacaagtagcagttgattcaagttggaaaagatgtggacagttcaagggaaatcgttccttcctccatgctgctcctggcactcttaacaaagcaaggtccaggttttctgtttccatgaaaaccgaagcttgggtaaagttgataaaaactgagcaactaaagccgggagacttgaaaccttttttcgttgctggccagtctttgctagtagtatgtgactatgacggtcaagtatactgttctgccaacgtttgtccacaatttggaacaacaattggatcaaggaacggtatctagtggtaacttgatatgtgcccagcataagacttc

SEQ ID NO: 2867 - DNA, 376 bp, Cyanidium caldarium
  Clone ID: LIB190-055-Q1-E1-G9
ccacgcgtcaggaaattggatttggttttgtgacaagtataaagcaaacagtgcacctgtattattatcgtttttgttgttgttgtaacagcctgtgtctctctaaagagtttcttgaaatgcagagagttggattggttggtgattcggtcaccaagcttcacttgttaaggcgcagtttctcgcaatatgcaagaccttggaataatcctgaaggaatatatgcctttgttcgacgttgaaaagattggggctccctacccggtagagaatggactaatgatgagctaagattaaaatcctttgacgacttgcacaagctttggtgggtccttataaaggaaagaaacgctttgttaactgaaagagactggtg

SEQ ID NO: 2868 - DNA, 97 bp, Cyanidium caldarium
  Clone ID: LIB190-055-Q1-E1-H1
acgcgtcaggagggaataatgtcaaaataaaacagaatgatatgaccccggaaagtttttctgaaaaaaaaaaaatccaacaaaaattccatgcaaa

SEQ ID NO: 2869 - DNA, 426 bp, Cyanidium caldarium
  Clone ID: LIB190-055-Q1-E1-H10
acgcgtcagtgatgggtggagtagcgaaacaagagaagggaagtaaaaggtaagaaagaggaaaggtttacgagagaaggaagtagaaagaagagagtgtaaggcggcgtcataatagaaatccgaaaggagtagaagaaaagagagagaagaaagaaaagaagagaaaagccgtactgaagaccgacacaggtactcgaggagaaaggagacccaaattaaggtgagagaatggacgataaggaactaggcaaaaggatatggtatctgcggtagaacatatgaaagaacatgaggaagaaagacgcaaatacgggaaagcagtaaaagaagaaagagaaacgaaaaaactgagtatcaggaagaaaagagggagtagatgaggacagaaagatcaaggaagtaagagtaagagaaggagtaatg

SEQ ID NO: 2870 - DNA, 228 bp, Cyanidium caldarium
  Clone ID: LIB190-055-Q1-E1-H3
agcggacgcgtgggtttttatggaaagatataccgagtcatttattgaagaacttgaccaattttgtgattgtattctgcatgacaaacctgttccagtgacaggttgggatggaagagctccagtcgttattgcgttggctgcgaagaaaagttatatggaaggacgtcctgttcgcatagaagaagtggattatagtttgtcctagtaaagtttgtattatttttg

SEQ ID NO: 2871 - DNA, 427 bp, Cyanidium caldarium
  Clone ID: LIB190-055-Q1-E1-H5
agacttggcaaaagcaattgataagagaatgtggccacattcgcatacacctcttcgacagttttcatctcagttacctgaagaagtactgaagcgaattgaaagaaagacagatttggaaattgatcaatacctagatttatctccagcggaattaggagagttgtttcgaagtccaaaagatggcaagacgattcatcgcctattacatttattgcctagaatggaattggctgtccatgtacaacctattacgcgctcgactattcgcatggaattgactttgactcccgatttccttttcgattccaaggtacatggagcaggagaacctttttggatctgggtcgaagatcccgatggagaaaaactaatgcatgtagaaccttttttctgcgagcgagtttaagtcaagaggagcatacag

SEQ ID NO: 2872 - DNA, 354 bp, Cyanidium caldarium
  Clone ID: LIB190-056-Q1-E1-A1
gagtgtgcggcctgccaaatagtagagaagaaatcgatgaaagtgaaagcgagtaaaagatgaggtatagagaatggcggtcctaactgtaaggatccaaaggtagcgaagtaaatagacgtttgaaaggcgtccagtatgaaaggagaaacgagtgtagcactgtctagtcgtccaactcagcgaaacagcaataactgtgaaaatgcagtaaactagcagtaggacggaaagaacccataattcttgactagatacgtttacggaagagagagaatcatgaagtagaggacgtggggtaagagatgagagaccactgcatgaggataaagaatctaactgagtaaagaaaat

SEQ ID NO: 2873 - DNA, 400 bp, Cyanidium caldarium
  Clone ID: LIB190-056-Q1-E1-A12
agcccaagcgtccgcccacgcgtccgatttcatcgattgtggtgagtgttgtggttccgtggcgtcgtcgtggggtggattgtgtttgttgtgtgtgtgtaaggaaacccgatgcaaaacgtgcaaaagaaaattgtagatctttatgttcctagaaaatgtgctgcttctaaccgaattatcacggcaaaggatcacgcttctgttcagttaactgtagcacaagtagatgcgcaaggtcgagtgacaggagaaacaacgacgtttgctttgagtggatttattagaaccaagggattatcggatgcagcggtcaacaggatatgtgaagaaaagggactgctcaacgaccttcattagaacaactataaaacaacaatagcgtttttcttttggatgt

SEQ ID NO: 2874 - DNA, 379 bp, Cyanidium caldarium
  Clone ID: LIB190-056-Q1-E1-A3
cccacgcgtcaggttttccgaagcattcagtctttatcgtcaattgattgtaactcttccatttgtctccgtagtggacgattcgcaatgcagtctttgtatggaaatgctgactacttgtagagaatatatcgtcggactgatgattcgtaccaaacaaacggaagccaaatccaaaggagatttcgtccgacagttggaattggcagcgctcatgaagcactgtaatatgtcgattacgcatcaacatttggcattgcaagtagctatgaaattagcttattctacgaagaactatcctttatgcgctgaaatttgccgatcgattgttggagttggcacccaatgaagatatggagaatactgccaaaaaagtgaa

SEQ ID NO: 2875 - DNA, 423 bp, Cyanidium caldarium
  Clone ID: LIB190-056-Q1-E1-A4
atcgacggagcagaatatttaagaaatcatcccaacaccttcgatgtgatcataaccgattcttccgacccagttggtccagcagatgtcttatttcaaagacctttttatcaaagtctccatgccgcactcaaaccggatggcatttgtgcctgtcaagcagaaagtatgtggctacatatggacctcatacgttctttgatggaaacttgtcgaagtatttttgcttccgtggcttatgcttatactatgattccttcttatccaggaggacagattggtttcgctatttgctccaaatcggtacgtgatagcttgacgaagcctctaagagaaccaaatgcagttacaactcagtcgctgaaatattactgtcctgagatacatgacgcggcatttgtattgccactccttgcaaagaga

SEQ ID NO: 2876 - DNA, 355 bp, Cyanidium caldarium
  Clone ID: LIB190-056-Q1-E1-A5
accaatactattttttcttcaaaatttacttcgacacaaagcctgaacgattccaagacggcgcagtaatcttgttctccacggtagctcgcctcgacagaaaaagacatgttgagctggctacaaaaaaaccacttgctagttgcaatattacaagtgtcaagaatgtttactctttatcgagtcacagtgcgtcttttcccctaatctttctttttcggtgtcgacgagtgcgtagacatgtcgtcttggtaacgcaaccctctattgacactctacgtttcctgtgcagcgtcgaactacctaaaacgcaaagcagcaaagtcccaaagtttcgactccttttggtttctcc

SEQ ID NO: 2877 - DNA, 418 bp, Cyanidium caldarium
  Clone ID: LIB190-056-Q1-E1-A6
agggcgctggtatggatttattaaaggatgaagttgatatgtccaaaagagatgcttcgggtaagtatatttcgccaaaaggagaactttcctagacgacgccacttgtgtcaggtaatatcaaaatgccagatattggattgttcttgaaagaccacatcagtgcgtggtttaccgagcaagtacgaatggaaataactctcaagtatattgatcctacttatatgattcgaagtatacctgcaaatgcaagtgactgtttgatgtgtggtttattggcccaatcagccgtacatagtgccatggctggtcgagggtgagattttctttctttttgtttgtcacaggaattgtttttggtaattgctgacgatatggattctagtggttttacaattggagttatcaatacccaata

SEQ ID NO: 2878 - DNA, 423 bp, Cyanidium caldarium
  Clone ID: LIB190-056-Q1-E1-A8
acgatgacatttctcaccaaaaaagatgtggaacattgtttcgatgtgatatggtttagcatatttgatatccaatattcttgtttatgttctttgaatgccttgaaccagatgtgtcgaacctacagcgtgtctgtgccggctggcgatgactttgaatttccaaactctccttgcttaagtgactgggatctcgttcattttgtttcccatagcaacgaacctgtatttcgtgtatttcacaagtgcatcatgtgctgctttttagaacaaagaatacttgtctttcgggatggcctttgtatactgaacaattccaacagctggttgttgttggatgctttgcgtgatatcacaaaatatgaaacggacaaagaaaacccgttcttctagttctttgccgtttgtcaagcgttgatgaat

SEQ ID NO: 2879 - DNA, 427 bp, Cyanidium caldarium
  Clone ID: LIB190-056-Q1-E1-A9
agagttggtgaggagatagcaaaggttatgaaaattttagtcagtgtaaagcgtgttgtcgactatgctgttaaagttcgagtaaaaccggacggttccggaatagatctcaacaatgtgaagatgtcaatgaacccgttttgtgaaatagctgtagaagaagcggtacgtttaaaagagtcaaaagttgcatcagaagttgttgttgctactgtgggaccttctcaatcttctgaacaaattcgtactgcgttagctatgggtgctgaccgaggcatacatgtgcaagtggaacaggagttgccgccatccgtcgtttcaagagctttaaagggcattgtactaaacgagacaccaagtctagtaatattacgaaaacaagcgatagacgaccattgtaaccagactggtcaaatgttggggcaac

SEQ ID NO: 2880 - DNA, 410 bp, Cyanidium caldarium
  Clone ID: LIB190-056-Q1-E1-B2
accacgcgtccggttggaagatatttatcggatggtttaaaacaaaagaaatagccaaactcagtagtaatgagccaggaggatgaggacaaggacaaacttacgcttcacttactagattggattgacgcatatgcagcagtacaagaagtgatcacaaaacgtttggctgacatcatccatttgctgagccgagaaaagtttcacgctcgcggtgggggagaaagactagatgtgctgttgttggaccagcgacctcatccagcgacttgtaagtgcaccccgaacgaaaagagtttaaacgcttcaacagattggcctctttccacgaaccttttacagcatttctcgtggagtgtaattcacgaaagcaaagaatcggatttagaagagttttgtttatcaacgac

SEQ ID NO: 2881 - DNA, 394 bp, Cyanidium caldarium
  Clone ID: LIB190-056-Q1-E1-B3
accacgcgtcagcgatgattcgatgcggcacaagacagttgtggtggcaactgcgcgctcgttatcatacaactactactgtccatagagtagcaggagaagaagaaaaggaatcggtcggtataaagcccaaacgtttgcatcagcctcttggagtttatccacaaggaaccaatctggaagaagtgagagaaaagtggcaaagtgacgctatggaacttatctcgaaagtacctccgatagtagtcgatggctatgtcatagcgtgtaatggaggcggtggtccattaggacatccaatagaatatattcgtttggaagcaccttatccttcaacttgcaaatattgtggtttgcgatatatcaacaaagacacttttgaaaagtggaaaaa

SEQ ID NO: 2882 - DNA, 409 bp, Cyanidium caldarium
  Clone ID: LIB190-056-Q1-E1-B7
cccacgcgtccgcaaacgggaggagcgctccgttcctcctgctgcagcaacatgggcaatgacatggaagccgagttgtaatgacatgaaaattcggtaaagtcagaaatcgaattggaacgaatcctggaagtcgtttgatgaacttcactggacgaagaccaggatggcggtggcattctctgcgttccatctgtactactttcagtctcacagctgtttaaactatccaaggaagatggatactggtcaaacattttcctttcagtagacattgctaccttttccaatccaccatgctcaggaattgaatgcacatcgccctattgatgtctattagctaatatctttgaattgcagcttaagcaataccttgggaatccatttgctagtttgacattgctctaaa

SEQ ID NO: 2883 - DNA, 440 bp, Cyanidium caldarium
  Clone ID: LIB190-056-Q1-E1-B8
gggaataaaaggtcgcaatggaacagcacaacaactgaacagtcatgttttttatcgtgtccaatattgttgagcacagcgttccacgagttggttgttcaagtttcttatcccgaaagtatatacaaagtcctccgaagaaacgttgtcctgttttagcgagtatttttcaaagcttcttccctgcggagagcaacacttccaaagtagtgcaactggaagcttgtaacatttctcacgacgcacagcaagctgtttttgtggacaacatggctggagaagcacgaaccttagagaatgttaaccttgaaatactggagggagagtttttgttgctcatcggtgagaatggctccggaaagagttctttgttgaatattctggccggactggacgtacctgatcaagggtatcccaaatggtatggcaagaagatcaag

SEQ ID NO: 2884 - DNA, 394 bp, Cyanidium caldarium
  Clone ID: LIB190-056-Q1-E1-C1
accacgcgtccgcccacgcgtccgcccacgcgtccggtcgattccaagtagcgatggcgaaaagtgaaccgggggtgatatacataggtcacttaccgcatggtttttacgaaaaccaactaaagggctttttctctcagtttggaaccgtgctgaaagttcgagtggcaagaagcataaaaacttatcgaccaaagggttatgcttttgtgatgttcgcgaaccgagaagttgccgaaattgcttgtagagctatggacggttatttcatgtataacaaaattttggtctgtaaaatggtaccaccagagaaagttcgcccgaatatgtttagaaagttcgtgaagattccctggaagaagctagaaaagaaccgccgtgctttgccgctcac

SEQ ID NO: 2885 - DNA, 384 bp, Cyanidium caldarium
  Clone ID: LIB190-056-Q1-E1-C2
tggttggttggttgcgcccatggagcattcgatgaacaaagtattggaacagctgtaggtatagttttgttgcaacatggtgcacatattcacttgaaaaaagggcaaatgagccaaaagtaaaaggatatcttgttacggattgggaagggctgtgtattgcgtgtgagtttttttgtactggttgttactcacgtcactaaaggaaactcgtagcaaggggtgtggccccgtcgcagtcttcaggttggatcacaagattagctgaagcttcacttatgttgagaaacgatatgaaaagtgatgaaaagcaaccacctctcgttcaagtcgatttgggaaaatatgttgtagcaataaggcctatggaaaatgtaataatgg

SEQ ID NO: 2886 - DNA, 283 bp, Cyanidium caldarium
  Clone ID: LIB190-056-Q1-E1-C3
agtgattggaaagatagccaaagaaagctaccaactggaagtagttggtctgacaaggtagctcgttctgtgcctagttctattgcacaacaacaaacgaattcggtacctacggacaaaagaaaggagtcagaacgagtccattcttccattggattttgggactacatagatcagtctctggaaacaaaagagtcgaagcctcccaaaaaggagcctacttcctcgacaaagcattccgttgacaaatacgaatcgctagacaagaacaagtcctttggag

SEQ ID NO: 2887 - DNA, 411 bp, Cyanidium caldarium
  Clone ID: LIB190-056-Q1-E1-C5
agagtgcagtgaaggaagcaggtgctattggtgacgaaatttccaatgcaaaaaatggaacctcagtggaacatgaaagccttcctgaggaggaacaagcaactgtggatcctgacaagatgagtaagcgctatagagcatcctggtttataactgctgtacttattgcagctgaaacggcttcttctggaatgttatctcttccctctgcggtacaaactctaggatatgttcccggaactattctcttagtgtactttggagctgtggctacttatacaggttacttgattcacaagttctgtgagaatcatagagaagtaagacattacgacgaagcagctggtattgttcttggaagagttggaagagaagtcatatatgctgggcaaattatcctccttatttgtg

SEQ ID NO: 2888 - DNA, 428 bp, Cyanidium caldarium
  Clone ID: LIB190-056-Q1-E1-C8
accacgcgtccggaaaggagggtcgacgagctcagcttgaagaacaaagaacttgcgtggggttggacgttatttatgaacttggactctattgacacaggaattaatgctccttttgacccgtttgcagacgcctcacgtggagaggacgcagcagtaaccaaaaatatagtgcatattcgcttgcaacaaagaaacggccgcaagtgcttgacgacgattcaagggcttgacacaaaattggatttgaataaaattacaaaggccttcaaaaaggagttttgttgcaacggttgtgtcgtagacgacgcagaactgggaagagtcatccaactgcaaggagaccagacggataaagtcaaaaagtttcctagttcaggagaaattagctgaaaaagacctgatagaggtgcacggtatatgagtgt

SEQ ID NO: 2889 - DNA, 428 bp, Cyanidium caldarium
  Clone ID: LIB190-056-Q1-E1-D12
agcgttttggtgacaaggaaagataaatggtcgtcaaaacagaaacctgtagtttttcaggtttccgcatctaccccggaaaaggcactcgatttgtgcgcggggatggcaaactcctcatctttagtaaccgcaagtgcaaatcctactttcatatgcgtaggagaccggcagagttgaattggactcagttgtatcgaagaatgcacaaaaaaggacagcaagaggagacacagaagcgacgtcgtacgcgcaaagttgctgctgtaccgaaaccggtggaaggcgcgtcgttggaagtgatcaaagcaaagagaacgcaacgcccggaagtccgaaaaactgccaaagaagcagcgttgaaggaaatttaaacaacgccaagctgctgcggctggaaaaagaaaaggtggaagaggagatgcgac

SEQ ID NO: 2890 - DNA, 228 bp, Cyanidium caldarium
  Clone ID: LIB190-056-Q1-E1-D2
gtgcttagaaatggccaaaaatctttgcaccaacttttcggtctattgactttcaaaatttgcaaccagcgcaatgaatcgctgcggtcaatgcaagcttcgaagcaaaaccgctagagcattggccaggagatcgtcttttcgtttcgggaaacgcttgatacagaaatcgagagaatatccttgatgccaagtgaataaagcttataccaacaaaaaacaactaag

SEQ ID NO: 2891 - DNA, 446 bp, Cyanidium caldarium
  Clone ID: LIB190-056-Q1-E1-D4
accacgcgtccggatcatcaaatagaggatcaaaaagacacagaacgtcgacagtattttgcagttgacaagtatgagaactgtcaactattgtagacttcattttttattagccatacgtaggctccatcaatatgttgatcaaagcaagaggaaagtagtggttactggagtcggcctggtgacacctctgagcgttggtacgagtactagttggaatagactgattgctggtgagtgtgcagtggacagaattcgagcttttgatgcgtcaaggtttcctgtacagattgctgccgacgttcctagaagcagttgggatggtttgggtccgtatagaagagtgaattgtaaagttttgcacgatgaggagtattttgatgccacaagaatagtacggttttctgaggaagacaagagacagataccagagtttatacagtttg

SEQ ID NO: 2892 - DNA, 414 bp, Cyanidium caldarium
  Clone ID: LIB190-056-Q1-E1-D5
acccacgcgtccgcccacgcgtccgcccacgcgtccgcccacgcgtccgcattaattctatatgttcggtggagtttttgtagccaactgggagatttgagaatattttacaatagttttgtgcagcatttatccatacagccttctggaagtgtaagcatttcgaagcaaatgcctcatttcaaatatattccaccattcaactctgcaataagtggagtttgtagttccgggaaggaattatactctttgaatgcttggaagtcattctacgataagtatttgtccgaagatggtatatttttcgtcgattaagacagtgattatggacctagtataattattcgagtgactggaaattgcttatcttcttctgatgaagagaactcatcttcagaacttggggagtcggaa

SEQ ID NO: 2893 - DNA, 142 bp, Cyanidium caldarium
  Clone ID: LIB190-056-Q1-E1-D6
accacgcgtccggtggaagaacatgaaagcacagaagaatgtaagaaatggttagagtaaaaaccataaaggaagtaaaagcgggaatctgagaggaggaaagccacattggaactgagaaaaaggtcaaacaggagtggag

SEQ ID NO: 2894 - DNA, 200 bp, Cyanidium caldarium
  Clone ID: LIB190-056-Q1-E1-D8
agagagttggctggaaaagtgtggagagtcggtttgatgggatataatagtcgtcctgatgttgtcttgacattgttagctgcgttcgaaagagctttgaaaaaagttggctatctgcagtcgcagtgatttgttgtcctttcattgtctcaaagttgtgttggagtaagtcgcgagccataaaggtttgtttttataag

SEQ ID NO: 2895 - DNA, 305 bp, Cyanidium caldarium
  Clone ID: LIB190-056-Q1-E1-E3
cggacgcgtgggcggagccttggtgacactgctatggctgttcctgtgagtccaacgctatatccgcagttggatgaaactcctgcagaccgttcatttgtatttcaaggaggtgacagttattctgcaaaaggacagccgtatccaatggaaggactctattcttcatactacggatcaggcgatattccaaaagcatccttaacggttgcagattattatccgtcttccaatccctatttgttggcatcggctccttcgatcgattatacgtagattgattgtaaattaacacaagttgtgtg

SEQ ID NO: 2896 - DNA, 416 bp, Cyanidium caldarium
  Clone ID: LIB190-056-Q1-E1-E4
accacgcgtcagtgctaatctttcgcgcggttatgacgaaatcaaatttacgcgcagtcgctatgctattcttgacagtaacactgtttctcatccgctggaaatattcgacaaaaagttttcttgagcaaaagaacatcaagtcgaaaccttcagtagctattatcgtgcccattagaaataggccatttgaagagaagttcataagagtctatttctcacagtatcttagccagttccaagagtactcttatgaaatcatctttgcagaacaaattctggatgactatcactttaacaaacgattgctttccaacgcagctttcctttctttgaaaaatcgtttctatgactgctattgtttgcaagacgctgatactgtgccacttaccaacgagttgttataccgttgtcct

SEQ ID NO: 2897 - DNA, 431 bp, Cyanidium caldarium
  Clone ID: LIB190-056-Q1-E1-E5
gttgtgttagcattttcagcaacaataattggacttgatggaaggaaggcagataacatatggaacgatgccctatattatcatggaaaagtggtgaacttttgtgcatattcggcttcgtctgtttttgaaggtggcgaccatggcgcatgtaaatatgtgatggctttggcttctatcagcttgattttagttttctttctttggttggcctcctttgtcgacgcattgtatccaattcttacaaagttctggtttgtggagcttggtatcaacatattccttactatgtggtggttggttggtgcaattgtggtgactgcaaagcgaccttctagtgttgttatggatgcgcttcacataacgaaagatatcaattcaatcgaaggcctttcatggatcaactttgcttttacgctattcctttgtgg

SEQ ID NO: 2898 - DNA, 311 bp, Cyanidium caldarium
  Clone ID: LIB190-056-Q1-E1-E6
agtcggaatcgattgcgtttggaggagagagagagagagacgaccgagtcttttttgcgacagtgagtatcatggtgacgaaaacaaccaaaaatatggttcaagtatttggaagaaagaaaactgcggttgcggtagcgacggttactggttcgggaaaaggtctcatccgagtcaacggcgttcctttggagttggtacaaccggaaattttgcgcatcaaagtttttgaacccatacttattcttggtcaagacaagtttgcggacttggatattccgttaaaggtcaaaagtggtggacacaccaac

SEQ ID NO: 2899 - DNA, 445 bp, Cyanidium caldarium
  Clone ID: LIB190-056-Q1-E1-E7
acggacgtgtggggtaagaaatggttagagtaaaaggactagaagaggtacggaattcacgaggaaggagcgtgaaggaaggaggaatcccaagtaatcgaggaagaaaaagcttcggtgaaagcgtgaacggattttgtacacactgcccgtcaagttctggaagtgtgctaggaataagcaggagaagtagaagagagtaggaaaaggaagtaaaaggagggaatgaagggaagttatggcaaaaacacgtgccagcagcagcggtaaaacgtgtgtagcaagcgtagagcagaagaactgggtgtaaaggtcgagtagtagagtaagtgtaaaagggaaaggaaaggagagaaagaggaaagggatgaaatgcagagatctctagagaaaggcaagaaagaccagaaaggaagacacagtaaatgacagcacagaagaatgt

SEQ ID NO: 2900 - DNA, 403 bp, Cyanidium caldarium
  Clone ID: LIB190-056-Q1-E1-E8
agcctcctcctcctcctcctcctcctcaatcttctatatcaacgaccattactggaaaagctatttgtagttatgtttctgcgctattagaagaaggagatcgcgtattgaatgctattcgaaagcatacagttcctagtggtatgtttacagaggagattgatcgatatactggtttcgagcaaggagctatcaatttaacttggagttatgatgcctttgttactgcggtttggtcgagagaagatgttcacaagttgttttctaaatattgtgaacctccttctccatctctacctagtatgccaggacctggtggtttatcttctccatagtaagaggcacttgtgcactttggatatttttgtggttcatataaagacaagctttattaaaataccac

SEQ ID NO: 2901 - DNA, 398 bp, Cyanidium caldarium
  Clone ID: LIB190-056-Q1-E1-F2
agccgtaattggtagcaaattggaaatatcaagaaaggttgtttcattcacacagagtgtagctctaatatggacttgaacccagagatgagttttcgtttttccgcctggttctcgactcctgttggtacgacaacttgagtagctttctctccttttgtcaaagcagtcttcttgttcttcttgcgtccagtcttttgttcgcgattagcctgcttgatttgttttttaaaaagttacagagtgatgtatccgcccctatttgttgtgttcccttgaacaaagaaatacgtttttaaagcaagacaaggaagcctttgatgggcttgaagaaattttatatgcggtgcatcgccacgaaaacgccccaaatgaacgtccttgcacaagagagatgg

SEQ ID NO: 2902 - DNA, 394 bp, Cyanidium caldarium
  Clone ID: LIB190-056-Q1-E1-F5
gaggaacaatgcacctcatactgctgggttccagtacagacctatgaaacttatcaatgttctcaagagaagaagaaggagtacagctatccttgtcaaacttatgagcaggtttcaactacttaccagtgtggtcagtacgagtcccaacaagtttactaccaatgccaaaagtataaggaggttactcagcaagaatgccagtacgtccaagagtcgtattgtgtcgagtatgaagaatgtcagcaagttacccaggaagtttctccttcagaaattgtctactacggtgaatcttcttctagcagtacttacgactactagaacacttgtgaaatgcccaaagtcgcaaagtacagtcgtcttttttgaagaaactgttactttttgtccc

SEQ ID NO: 2903 - DNA, 331 bp, Cyanidium caldarium
  Clone ID: LIB190-056-Q1-E1-F8
acgaagaatcagatgttgcaaagaaaattctacaaataacaggtggaaagggagcagcggcagtagtggatgccgtaggaggagagatcggtacagcctgttgttcagctcttgcaaagggaggactatttcaaggttatggattacagagcggacttcccattcaagtcagtaacagcgaccttattttcaaagatattgtgattagaggtttctggttggcattgtggtttcctaaacaatcaccttctgtcgttcaagaagttttcgatatgtttaggaagaaagaacttgttccacatattcagaagatatttcctcttgaagacta

SEQ ID NO: 2904 - DNA, 189 bp, Cyanidium caldarium
  Clone ID: LIB190-056-Q1-E1-G1
aggacgcgtgagtggcaattattgaaacaagaggagcgggctttggaatccaaatgaaacaaaaccgtatacaaacgtattttatactacttctttaggttgccaatgccatggattatgtcgtttgttaatacccgtcttttctttctagtttgttcggagacaaccaggaattatctccagtcgacg

SEQ ID NO: 2905 - DNA, 456 bp, Cyanidium caldarium
  Clone ID: LIB190-056-Q1-E1-G8
attcccgggcccgaacacgcgtccatgttgacacaagaaaatgcctaagaaagctgttggtattgacttgggaacaacttactcttgtgtaggagtatggatgaacgaaagagttgaaataattcctaatgaccaggggaacaggacgactccttcctatgtggctttcactgacgaggagcgcttaattggagacgcagccaagaaccaggttgccttgaaccctcaaaatactgtatttgacgcaaagcgccttattggtcgaaagttttctgatccttcggtgcaagcagatatgaaacattggcccttcaaagtaattgccaaggatggagataaaccccatatacaagtaacctataaaggagagacaaagacttttgcccctgaagagatttctgcaatggttctgcagaagatgaaggaaacagcggaagcgtatcttggttctgctgt

SEQ ID NO: 2906 - DNA, 430 bp, Cyanidium caldarium
  Clone ID: LIB190-056-Q1-E1-H12
acgcgtcagaatttgaaacgcgtgtttggttttttactttgtacttgattcttgtaaaacatgtctgacgatattgttgccttggttattgacaatggctcgggtatggtgaaagcaggagttgcaggggacgatgctcctcgttccgtcttcccttccatcgtaggtcgaccaagacaccaagctattatggttggtatgggacaaaaggaaagttatgtgggtgatgaggctcagtctcgaaggggtatactctctttaaaatacccaatagaacacggtattgtcactaattgggatgatatggaaaagatatggcaccatactttctacaatgaacttcgaattgcacctgaagagcatccagtcctgttgaacgaaacctcctctcaatccaaaggcaaacagggagaaaatgactcagatcatg

SEQ ID NO: 2907 - DNA, 433 bp, Cyanidium caldarium
  Clone ID: LIB190-057-Q1-E1-A10
cgacccaagcgtcagggagattaaggctgagaaggagcagtagttcgcttccggagcctgaaacaaacactcatatatacatatacatatattttctatagatatagctattcttcaaatggtttccaaaaagacgaaaaaatccactgagacagtctcttcaagattggctctcgttatgaaaagcggaaagaccacgttgggcttgaaaagtacgttgaagagccttcgtcagggaaaaacaaaactcgtggtcttggcaaataactgtcctcctcttgtgcgctcacagattgaatattactgtctactcgccaagtgcaacgtacaccactttcaagggaataacatagaactaggaaccgcttgttggaaatacttccgttgtggctgtttaggaattttggaccctggtgactctgatattctcaag

SEQ ID NO: 2908 - DNA, 428 bp, Cyanidium caldarium
  unsure at all n locations
  Clone ID: LIB190-057-Q1-E1-A12
cgacccaagcgtaagcccacgcgtccgtctgcctcttctgttgtagaaggaggggaccatggagcgtgtaaatatgtcatggcgttggcgtctataagtttgattctagtctttttcttgtggctttttacatttgtagatgcgttgtatcctattcttaccaagttttggtttattgaattgggtatcaacgtgtttcaaacaatgtggtggttggttggagcaattgttgtatctgcaaaaaggcctacaagctctgtactanacgctttaaacattactaaggatattaatgctattgaaggtccatcttggatcaactttgcctttagcctattcctttgtggaattgcaatagcagatggtttgttggttggttcaagaagtgcatgctcggggaaccataatagtggaaatagtaataatgc

SEQ ID NO: 2909 - DNA, 395 bp, Cyanidium caldarium
  Clone ID: LIB190-057-Q1-E1-A5
ctaaatgcgaggattgtcatgaagcagtgtatatggccgagagaagtgaccgttggatgggagcgcggcagatcacatgcggttgggttcgttgttcagcgtggagagtggaacttagcctcgggaattacacactgttagatggagttctcggttgcaggccgcactttcagggagcagttcgttctgctggaacgtagcgagcaccggacaggagcgggggagcgtatcgaggaagcttcaacgaaggggaactggacagggtgttgcgtcacaaacaagtggggtggtatcatctcaaactgtaggtaatcccaacgctaacgatggtatgggagagtcatcgaatgctgctgttttacaaactagtaacaacgacaatggaaaagaaacta

SEQ ID NO: 2910 - DNA, 384 bp, Cyanidium caldarium
  Clone ID: LIB190-057-Q1-E1-A9
gacccaagcgtaagatacgcagcgattccatgttgaaagagggtacacgtatattgtccgatctcaagtttcaggtgcttcaagatggaaaacctcaggtgataacttcggatcaagtattcggaggaaagaaagtactattgtttgggttacctggtgcctttactccaacctgctctaggcagcaccttccaggctttggacagaacgttgatgaaatcaaatcgaaaggagtagatacagtcgcttgtttagctgtcaatgacccttttgtattacatcagtgggcagagtcacagggagtggcaggaaaaattcccatgttatcacatggtggtgcgcaatctgtcaagaaacttggactggatatcgataccggtgacc

SEQ ID NO: 2911 - DNA, 417 bp, Cyanidium caldarium
  Clone ID: LIB190-057-Q1-E1-B10
agcggacgcgtgggatggagtatatggctgtgattgttgtcgttgtttggagaccatggttagcgccaccctcagtagtatgtctagagccagcttatggctcacaaggttctttttgtacacagtcattctcgccttttctatcgccatagatggagtgatgggaaaaaagggcgacaatgtttggaatacaacccttttatacaatgggaaagtcttcgacttttgcgcatataaagccagtgcgatgaaggcgatagagtataactttatcggaaacccgcctacttgcatgtatgtcatcgccttagcgtcgacgagcttcatcgtctattttatcctgtgggtgcttaccattgtggacgtcttttaccggttcctgaacaaatactggccgggagagttgtttaccaatat

SEQ ID NO: 2912 - DNA, 74 bp, Cyanidium caldarium
  Clone ID: LIB190-057-Q1-E1-C1
ttacaagagcatgtacgagtgtagggaatatttaaccgccagattctcaccaacaatttgggtcgttctgtggg

SEQ ID NO: 2913 - DNA, 353 bp, Cyanidium caldarium
  Clone ID: LIB190-057-Q1-E1-C10
gacccaagcgtcagcccacgcgtccgcccacgcgtccgcccacgcgtccggtggattccgagcgcttgtcattacctacgctagtggacgagaccatggatgccgatgaaagctttcatatcgtgacgagcgaattttccgaggatggtacacacacagctatcgtcactccacgtacacaaatatccagtcgtgatatcgatgcacgtgttggtcgtcgaagaaatgaaacagtgagctttgacgacaccgtacctagccatgccttgcaacaagaagaaacagagactgtcgagtatcaaggggattatggaatgggatgcattgcggacaatatgttcggagccagtagg

SEQ ID NO: 2914 - DNA, 378 bp, Cyanidium caldarium
  Clone ID: LIB190-057-Q1-E1-C11
cgacccaagcgtcagcccacgcgtccgataggttgcagttgcacttgcaggtccagctcgcttatcaccttctgcctggttatctattgatggtttcggagtatatggaccagctgatgtgttttaatattagtgcttatccagaaagtacgctccctgcctacagtagcaacacttcacgggaggatgggggttttggaaactttaaaccttatacaagtcctattgcaatgatacgctcagcctctatgatgcttcgtcattctttggatcaacctgcagcagcggatctgttacaacaagcactgcaacgtaccatggaagatatttcgaatagtgaagtttctcacaatggttcgtttttggaatcacgggcta

SEQ ID NO: 2915 - DNA, 425 bp, Cyanidium caldarium
  Clone ID: LIB190-057-Q1-E1-C12
gacccaagcgtaagtgctttctacgtgtatattttataagcatagcaactatacttggaactggtattcttggccttccagttacactttatagctgtggcttctttccttttcttattgtatttactctagtactatttgctcaagtatgcgtggtgtttgcgtttgttgaactactacaacgaacagacgcttcccttgtcaagttatccaatgagttgcgaccaattagtgccatcgttcctgaacaagtcgaatcaaccagtgacagtgccgtggactcagaagtgacggaacgtgcagagcattcttcaacactgcacgacggtattcctgtagtagcaggttcgtgaaaacttatttgtctgtttttgctgatgttgttaaagaatgcccctgttgcttccctatttactatgagtgta

SEQ ID NO: 2916 - DNA, 444 bp, Cyanidium caldarium
  unsure at all n locations
  Clone ID: LIB190-057-Q1-E1-C6
cggtctaagcattccgggccgacgcacgcgtccagtcagacggaaaggttgcaaaactttggagtgcgtccacgattgcagagcacttttggcttgcgtagacttctgtagaattagactcgacacttgtttatgttgtactttgagtanatgagagctgtgattgaacgtgtcagccaagcgtccgtaactggaggaggaaaggtcgcttccattcaagagggtaggaaggtgagacagggttttaggagtaaagagtatggagtgccaggtctctgcatgcgtttgggcagcgctgcgcgaagacacggtaaggaggatcggttgtgttttatttttgatattttcgggcacgctccgttaggaggaagatcttgaatacatgtaagtatttgggctcatgtttcgacctcacataatgtctcgttagtgttcaaaagacac

SEQ ID NO: 2917 - DNA, 304 bp, Cyanidium caldarium
  Clone ID: LIB190-057-Q1-E1-D10
gacccaagcgtcaggcgtaagtctctcaaggccaatcctccggaagaaattccacggtcaaaacaagagtccgctctagttgactctgtggaggatggaaagcacgtcggcagccatgaagaggttttcaatggcgcctttcccaagttgaggttatcgcaagcccccagtagcgtggatagtacgaagaaatcggagtcaggacaggtttatctgccctatgaaagagataattggaccgagtcagagtcttccaacgttggacacgttcctgaactctcacaccacctgggttggagacacc

SEQ ID NO: 2918 - DNA, 429 bp, Cyanidium caldarium
  Clone ID: LIB190-057-Q1-E1-D12
gacccaagcgtaaggtaaaggggttgggtgaagatggcacaaccttcccttgacgagatcttcaagaagcctccgaaagactgttcgcaagattactgtgacccttatgaattctatgaatatcaaagatatttggaaagagagtataaagtcaagtccgaagagtttatatatataaaggacaaagtcaaggagtgttattatcgtgaaggggtcgctcactataagaattgccgtgaacttgttgatcagtattggaaaaagctccgcgaagtacgccgtttctatcatgatcaccgaaggattatacctggaaaggaatatattcctgttccgaagccaaggaagtcagaagaactgctggatagtgcggatgtagaactgaaaaacgtagcagtgacatcagcttggatgaacctcagtcctaac

SEQ ID NO: 2919 - DNA, 427 bp, Cyanidium caldarium
  Clone ID: LIB190-057-Q1-E1-E10
gacccaagcgtaagcccacgcgtccgcccacgcgtccgaatttgcaaatatttgctatctttagcagtagtgttatttgtatctgttcatattgctcgagcacaatgctcggaagagactatcaaacaaatggaggcaatatttatacaaaactttacacaaaatgaagcaatggctcctatgtgcttacattctgcctttcatgactgctggaatggttgtaacggagcattgtttttaccagaagaaatagacagacctgagaacgctggtttacctccgctgaaaccactgctgatgccatttacttcacagtttccttgtatcagtattgcagacttgatcaactcttgtgcggttactgctctgaagtttttgggtgggccaaattgtccaagtgtactagggaagactcgacagaggtgtt

SEQ ID NO: 2920 - DNA, 434 bp, Cyanidium caldarium
  Clone ID: LIB190-057-Q1-E1-E11
ccggctcgacccaagcgtaagacaacgtgcccttttggagaggccattgttgagttgggagacacaagtttggcagtggagacttgtgaagagttatttactgtcgatcctccgcacataaaatatgtcttaaatggggttgaaataattgcaaacggctcaggatctcatcaccatcttcgaaaacttgaccaacgcttagatttgatacgtggagctacttgtaagggaggtggagtttatttatatgccaatcaacttggatgtgatggaggaaggttatattttgatggatgtgcttgtatttgtgtcaatggtgaaatagttgctcaaggatctcagttttctgtggagactgaagtggaagtgattgttggcactgtagatttggacaaagtgactagtcatcgtgttggagttgcctcacgaggttt

SEQ ID NO: 2921 - DNA, 427 bp, Cyanidium caldarium
  Clone ID: LIB190-057-Q1-E1-E12
gacccaagcgtaagcccacgcgtccggttggttggtttcgtcgcttcggtccttcttttgtgattctcgtgtattgcacgagaaaaagtccttaagatggaaagagctttgaaaagcagtgcacgtcttgtgcccatacgtccaaagcctgttgtaccttcaaaagggtctgaaactttttcgttgcatgtagttggtgccacgtgggatggtggttgcacgtactatataaggggaggagggtcatatattactaatgggagaattacagtaccttcaagggcgtctaatcccatgaccaaggacgagttcttcttactgggtacttactcgagagacaagcttttgccgctgtttgatacaactctacaaagttccgaaacacaattatgtgggttactttggggtgtattttcacagttgtttt

SEQ ID NO: 2922 - DNA, 430 bp, Cyanidium caldarium
  unsure at all n locations
  Clone ID: LIB190-057-Q1-E1-E8
cggtctagcattccgggccgangcacgcgtccacgagctcagcttgaataacaaagaacttgcgtggggttggacgttatttatgaacttggactcgattgacacagggattaaggctccttttgacccgtttgcagacgcctcacgtggagaggacgcaggagtagcgaggggtgtagtggatattcgcttgcaacaaaggaacggccgcaagtgcttcggggagcagtcaagggcgtgagacaaaagggcggttggataaatgtgcgaaggccgtcaaaagggagttttggtgcaacggtggtgtcgtagacgacggaggggggggaagagtcatcgaactgcaaggacgagagagggataaagtcaaaaagtttctagttcaggagaaattagctggaaaggagctgataaaggtgcacggtatatg

SEQ ID NO: 2923 - DNA, 424 bp, Cyanidium caldarium
  Clone ID: LIB190-057-Q1-E1-E9
gacccaagcgtaagcccacgcgtccgagaaagaggaaaggtttacgagagaaggaagtagaaagaagagagtgtaaggcggcgtcataatagaaatccgaaaggagtagaagaaaagagagagaagaaagaaaagaagagaaaagccgtactgaagaccgacacaggtactcgaggagaaaggagacccaaattaaggtgagagaatggacgataaggaactaggcaaaaggatatggtatctgcggtagaacatatgaaagaagcagcaccgactgtttagcaaaaacacagcactctgcagaaaagagaaaatgtaaagtatagagtgtgcggcctgccaaatagtagagaagaaatcgatgaaagtgaaagcgagtaaaagatgacgtatagagaatggcggtcctaacagtaaggatcca

SEQ ID NO: 2924 - DNA, 424 bp, Cyanidium caldarium
  Clone ID: LIB190-057-Q1-E1-F10
gacccaagcgtcagcccacgcgtccgacaatggcttatttgttgtcatagtatagaaaatacaacaaaatgatgggacttgttcgttgttagtggaaattttccgtttcatgactagatttggctttgtgataggaccgaacttctgttttcaacggaaacgtgcagctgacttgctgaaagaaaagaggcggctgtgttctttcccgcataggacagcttgtcatggaggtgttattatgagtcgatccaacgaaagggtaaccaagactagtgtggaacactttttgtcaatggccgcgaaaaagcttcgtgaagtctttggatattcccactttccttctggccaagaagacgttttgcaaaaactacttttgcctcggtagttgctttgggacttgttaccaactggtggtggaaaaagt

SEQ ID NO: 2925 - DNA, 357 bp, Cyanidium caldarium
  Clone ID: LIB190-057-Q1-E1-F11
gacccaagcgtcagcccacgcgtccgggcttttgtattcgaatctcgaaacggactagaagaaacataagacactgaaaataaagcaaagggtttgtaggtacaaaggctttcgtatcgacgtgactacagacaatttcgtacaagaggcgcgatggtagatcaagtatcttcacccacaccagactcggagcacgtgtggtataaaagttatcaaggtgaacaggacttgtgttacattcgagcacttattgacaacgacttgtctgaaccccactccatttttacttatacacacttcctcaatcactggtcacactcacgtctcctacgcctctttccaagtgaatgtactggg

SEQ ID NO: 2926 - DNA, 367 bp, Cyanidium caldarium
  Clone ID: LIB190-057-Q1-E1-F6
gcaaagaactcgattacttcggaagttgtagattcctcgcctaggcggatcgttgcaagagcaagcgtcaactcctcggtagaaagaaagtttcgtcatggaaagttcctacttgaaaaaatagaatcgggctcttttcactcgaacagggggaagccggacttggtgcggcctagggcggtgaagaggagaggccggtgaagaacagcggcgggagggacgtttccgggcgcaagactttattcctggtgaaggaaaaagtgcaacgcagattgccccggagggctacttgggttgtatcaacccacaagaggcacttccgagaggcgtgtgaggtgaccaatacaagtgtgaagattttaatggc

SEQ ID NO: 2927 - DNA, 411 bp, Cyanidium caldarium
  Clone ID: LIB190-057-Q1-E1-F9
agcccacgcgtccggcctttaaaagcgctgcacgctggttgttgagatacaggtttgtggattgttgaaaaagaaaagttgtttgaggaccaaacagagtgacaagaagagatggcaaggagaatattgggtgcttatatgggagatgccacagtggcaactctgttcagtatcaaaatgttgttctatcttactatcatgggtttctccataactatcttggctctcatgggaaagaactcggatggtatttggatacatagtgtgccacctgcagatcaatattgtgcatacaagtcttcattggaggtgaaccaccatggaattgcttcctattgcaagtatatccttgccgtacctgctattgggttggttatctcgtctttccagttttgctaccgtctgttgggt

SEQ ID NO: 2928 - DNA, 429 bp, Cyanidium caldarium
  Clone ID: LIB190-057-Q1-E1-G11
gacccaagcgtcagcccacgcgtccggcgaggagagacgagattgttgttgttgttgttgtttggttggttagttggtgggaaagccaaccacagtgcaagtattgttgcagatatatacactagtagaataattgttgaggtgcaccagtgtgtttgtggggtacaaaatattacgagaaacgaacaagatgtggtgttatgtagaagcttcatttccaacccataatcatcacaatgctaataataataatatacattgtattcataagagaggagttgcttgcaagtatgtaaacaagttggttgccataagttttactaggtcgaatcgttgcctcaactggagcaacgataccaaagcaagaataaccactactactactactgcagtaccctgcggaaaagagagcagccgaccttgttcttt

SEQ ID NO: 2929 - DNA, 328 bp, Cyanidium caldarium
  Clone ID: LIB190-057-Q1-E1-G5
tggtgaaagaacttagatcgagagcagactttgaccaggctagtcaagcagacaagttcgtgcgcgtggacttttatggcacttggtgcgggccttgctagaaggagttctccctagctggaagaactgtctgctgaccctactttaaatggggagagcgggtagctgtttctacgcaggtatgaggtggagagattggcagatgttgcgcaagaagttggggattaccgcgatgccagcttttatttgttagagaagaggaaagaaagtcgaagaactcgtcggtgcgtcgaggaccggttaaaacatatgattgagaagaacgctt

SEQ ID NO: 2930 - DNA, 385 bp, Cyanidium caldarium
  Clone ID: LIB190-057-Q1-E1-G6
acgatggccagcgtgatcctgtcacaattgtacctgggactcgtttgtatgagtgggttcgacaggaggaaatcttggggaagtctgagcatcaccaaggaatcagagacctcggaagactgggagctcctatggcatttgctcctgatggagggattgaaggttactattggggcgcgacttaggatcccagggaagggaattttcttgtaggtgggcggtgtcatccagaggagtgcagtgcgcgcatatgagatcgttcttgctcggagaggcgacggtcagtatgattagccaggatgtgcgggcgtatatgagacatttagtgctgcagtgcaggcttttgcttcaaaagaagcgggtgattcgggtccttctacaaaga

SEQ ID NO: 2931 - DNA, 425 bp, Cyanidium caldarium
  Clone ID: LIB190-057-Q1-E1-G9
gacccaagcgtcagatttctgccaccatagaaatttcgaaaccgtcgtttcattttgtggcttgcttttcttttctttcaagaatgagcaagactttggactcacttgacgattttcggtttgaagcaggtgttacacctttctcctccttttggattccctgtgttacctgtgttctttattttacgctcactagagttttcaagttgttggtttcgaatcgaaaaccccttcgttccccttcattactgtttttttacaatggctgtttaagtttcttctcttttattctctttattgctcttggtgcagttatttttgaaaagtccaaactctatacccctcatgagttggtttgtggctccgctacccatcatgatggccgcctccagtttagcttattggctaaattaccttttcaaata

SEQ ID NO: 2932 - DNA, 439 bp, Cyanidium caldarium
  Clone ID: LIB190-057-Q1-E1-H10
gacccaagcgtcagcgacgatttggaagcaatggagaattctcaaggtgataaaccagactgggaacaaaaactggaagaaacttataaacatttggaaagtttattgaagaaaaccgaagagatggaacagaaatggtccagatatagcttgtcgcagttttcaacggaagatctcgtaagagaactcgaaaaaagaatgggatgggcacaaggagatattccgatgtctgatgagaaaaagagattagtattcataggtcctcctggaagtggaaaaggaactcaagcaccaaaagtaactcagaaatattgtttatgtcatttggcaacaggagatatgttgagagctgctgtatctgcacgaacaggatttagggaaagaagcaaagaaagttatggacgccggtggtctcgtatcggatgaaattgtggtttct

SEQ ID NO: 2933 - DNA, 420 bp, Cyanidium caldarium
  Clone ID: LIB190-057-Q1-E1-H11
agagcgccgtcgcccgcaccaatcccacttgtctattgaagcacactcaaggagcgaataaagagactactgaaaaaaaaatcatgcaaaaaaatcaacccgttcacgcaacatagctgttttgatgtagttgcagttgcccattgttatagaacgagcagagttggagtttgagatgaagtagtcgttgctcaagcgaaacatagttgactggcatcgagatgacgcactagtgatagtttcttccaatcgcaggtggaataggttttccttgtagaggctgacttgtggactgcgagattagtgtggataaagctcataggaagaaaattccacgtgcttcaagttttcgtcttgaactggtgaaaaataatggtttacttggtgaagttgctatagcgtagaaaggtagccaacgag

SEQ ID NO: 2934 - DNA, 322 bp, Cyanidium caldarium
  Clone ID: LIB190-057-Q1-E1-H12
gacccgagcgtaagcccacgcgtccgcccacgcgtccgtgctttttctcgtcatgtcgcagtcccgctatgatcgtgccattacggtcttttccccagatggacacttatttcaagtagaagatgccttggaagcagtacgaaaaggaacaactgccgttggagttcgagggaagaacgtcatcgtcctggcaatggagaagaagagcattgcaaaactccaagaagcacgaactgtggcgtaaaatgtgtctattacataagcatatatgtcctgcttttgccaggttgacagcggatgctcgagttctggtgaaatcgtg

SEQ ID NO: 2935 - DNA, 393 bp, Cyanidium caldarium
  unsure at all n locations
  Clone ID: LIB190-057-Q1-E1-H2
ttcccgtaggtcgaccaggcctgcggcttgggaaaacgacgtcgtcggaacaactcgtattgcagagtggaattggatatcgacggctattatggggaacaaaataggaaggcgtgcacgtactttgacggacgtgtcagcaccagacgtcagtgcaagttgggcaaattttttgggacgcaccggaaacgtggaactgccagcatgggtggattatgtgaggcgggagtgcgacgaacgaactagctccagatggtccagactggcgcggcctgagaatggcagctcgcgcgcggcaaatctgtagtcggtccaggtagaggtgggggtgcattccgacgggtatacggtgctcgggagagaaggggatcgaagcctantcacttcccgttg

SEQ ID NO: 2936 - DNA, 266 bp, Cyanidium caldarium
  Clone ID: LIB190-057-Q1-E1-H8
acggtctagccttcccgggccgagacgcgcgtccgcgggtgtttgcttgggtatagcggtggtgggcgtcgtcgtcgtcgctgctgtagacgcgcgttccaagccttgaggacaaaagtccatccgcaatcgacgcaagtcttcattggtgacaacgtgacgaactaccgatacccattttaggcgaagaaatagaattgcgctgttgctacctacttcttgcaggctctaggtgcaacgctccgagagctggatgagctcttcta

SEQ ID NO: 2937 - DNA, 329 bp, Cyanidium caldarium
  Clone ID: LIB190-058-Q1-E1-A1
agcttacctctccaagaacgtgttgcacggcagtccatagaacgtgctgtaaaatgagagaacgtacgagaaagccaagtgaggaaacgaaggcaagtacatggcggaccgagaaaggacagggcgtaagacgtgatacagactaggaagaacagataacagagctataaaggacgtcaaagaagagtaccacgactagaagaggtacggaattcacgaagaaagaacgtgaaagaatgaggaatcccacgtgaggaaaacaacgcaactagagggcggcccgagaaagtagaagagcatgaaaagaagagagaatgctgggtggaata

SEQ ID NO: 2938 - DNA, 413 bp, Cyanidium caldarium
  Clone ID: LIB190-058-Q1-E1-A10
agcaagagcgttcctcagtacgggaagaagagactttgttattaggtaccagaagtcctcgaagtaattcagatattgagaatggttagagtatctatataaagtatatatttgctcaagtatgaacgattaggaggtgtgtctttgagtaccaccagccttgacaagaaggaagaaaccaaaaaaggcgggaaaaaggaagaacaaggaaagaagaagaaagatgacgacctaaaaactcatatggcgaacgaacgaactttcttcaagtggttatttacaggttttcatattggagctatgggtacttttattctggcattcttttcagagtctcgagatcctttcaagttgttattggttatcttttgttggttgattgccttgagctttgtgttttatggattatacaa

SEQ ID NO: 2939 - DNA, 410 bp, Cyanidium caldarium
  Clone ID: LIB190-058-Q1-E1-A12
agcccacgcgtccgcccacgcgtccgatcgtttgtggtgtttgtggggggagagagagagatggataccggaaacccttatacttctgtaggcgtaaggagtacaacccgagcaaaaaccagcgaatcaaagaaaaaatggaaaaagattctgccttatatcggaggtgtagttattctaggattggtggttggtttggccaaagcaaagcacgacgaagatacgggtgacaagaagaagacggcagtagcaaaagaataaacgaagcgagacattgaaacgctgtcgaatggttatgaaagggtgatatcgtgttgttggttcttattgggtagtttgttttttcgtatggattaaaagaaagatagacttgtgtctgtgattctatttgccaaaagaaaaatgctttt

SEQ ID NO: 2940 - DNA, 365 bp, Cyanidium caldarium
  Clone ID: LIB190-058-Q1-E1-A2
cccacgcgtccgcgcagcgattccatgttgaaagagggtacacgtatattgtccgatctcaagtttcaggtgcttcaagatggaaaaccccaggtgataacttcggatcaagtattcggaggaaagaaagtagtattgtttgggttacctggtgcctttactccaacctgctctaggcagcaccttccaggctttggacagaaggttgatgaaatcaaatcgaaaggagtagatacagtcgcttgtttagctgtcaatgacccttttgtattacatcagtgggcagagtcacagggagtggcaggaaaaattctcatgttagcagatggtggtgcgcaatctgtcaagaaacttggactggatat

SEQ ID NO: 2941 - DNA, 330 bp, Cyanidium caldarium
  Clone ID: LIB190-058-Q1-E1-A3
ggaagaaagaggcacatacgggaaagcagtaaaagaagaaagagaaaggaaaaaactgagtatcaggaagaaaagagggagtagatgaggaaagaaagatcaaggaagtaagagtaacagaaggagtaatgtgaatgaaagcaggaaagtatttgaagaagagagtgtaaagcgcgtagcttttgcataatgtcccagcgagtgaaagaggaagcatcaagacagaaagagaagtagccaggtaagacccgaagctagttgatcctatgctgtccaaacgaagtaacgctgaaccagtatctgtgggaaaaagattcggaagagatggca

SEQ ID NO: 2942 - DNA, 354 bp, Cyanidium caldarium
  Clone ID: LIB190-058-Q1-E1-A8
aggggcgtcgtcgtctttgggaacattgttattggttggtgaaagtttatagaaaatgacaaaaggaacttcgagttttggtaagagaaataacaaaactcacgttttatgtatacgctgtgggcgaagggcgtaccatctacagaagaagcgttgtgcttcttgtgggtacccatctgctaaaaagagaaaattcaactggtcggaaaagtcgaaaagaaggcgaacgacaggcactggtcgaatgcggtatttgagacacctaccgcgacgattcaaaaatggttttagagaaggtgtcaaggcttcttctaaacgtcctgctccagcaccttcagcagtataataattgac

SEQ ID NO: 2943 - DNA, 383 bp, Cyanidium caldarium
  unsure at all n locations
  Clone ID: LIB190-058-Q1-E1-B1
aggagaatgctgggtggagtagcgaaacaagagaagggaagtaaaaggtaagaaagaggaaaggtttacgagagaaggaagtagaaagaagagagtgtaaggcggcgtcataatagaaatccgaaaggagtagaagaaaagagagagaagaaagaaaagaagagaaaagccgtactgaagaccgacacaggtactcgaggagaaaggagacccaaattaaggtgagagaatggacgataaggaactaggcaaaaggatatggtatctgcggtagaacatatgaaagaagcagcaccgactgtttagcanaaacacagcactctgcagaaaagagaaaatgtaaagtatagagtgtgcggcctgccaaatagtagagaagaaat

SEQ ID NO: 2944 - DNA, 337 bp, Cyanidium caldarium
  Clone ID: LIB190-058-Q1-E1-B10
cggacgcgtgggtttttggatttcgacgattggcagtagcagcagcaacatgagccgtccagaatacttggcgcctcctgaaatatattacaacgatcaggaagctaaaaaatatttaacaagcacacgaatgaacgaaatccaaagaagcctcactgaaagagcgttggaactgctgtgtcttcctgctgaccaaaagtgcttattgctcgacttgggctgtggctcaggtctaagtggtgatgttattacagaaaatgggcacgaatgggtaggttttgatatatctcaagctatgttggatgcagcttgcaccagagacgttgaacgtgatttg

SEQ ID NO: 2945 - DNA, 355 bp, Cyanidium caldarium
  Clone ID: LIB190-058-Q1-E1-B6
agggattgaagaggaatgacgtcaagtcctcttccggaagaagatatcgttgctgttgctttgagactagtacaggaaggagacttgaatactttgaccattcgtaaagtaaaggaacttgttaaacaacaaattagtgttgaagactcctatgacgaccaactcaccgagctcgtgaaagttgctatcgatagacacattaccagtttgcaacaacaaagcatagaagatgactcaaccaagaacacaaagaaagatacacaacaacgaaacaaaccacacaacacgaaagaaatagacactagtctaactgaccaagaagtgtatcatcaatttgacaaagtacgtcgtcaat

SEQ ID NO: 2946 - DNA, 255 bp, Cyanidium caldarium
  Clone ID: LIB190-058-Q1-E1-B9
cgcgtccgcccacgcgtccgcccacgcgttcggaataaaaaaaaaaggagacaaagcttaagtcgcattaaacagccctttgaaacaatttttgtcgtcacaattagggggggttctcctcgggtttaaactctctaatatttttgttttgaattaaaacacctccaaaattttccccaaatttaatttaacgggcgtccttttaaaagctcttgaatgggaaataccttgaggtgaacaaccttaacgcctttg

SEQ ID NO: 2947 - DNA, 387 bp, Cyanidium caldarium
  Clone ID: LIB190-058-Q1-E1-C11
agaagaactcatcgagagaatatggtcgtatgtagaagagcacaaggaaacgcataatggagggcgctttttggtacaagagctgtgtagtgttttctcgggagatgatgtattatgccatcgagcattgtatgttttggttcaacaggagaaagcagttgtatatgaaatagaaaaagatgtttttggagttaaatttggtcctgatctttctatgaaagcgtttgataagaatattttttcgatgatgcatcaaatttcacgactggaaaagcacattgataatttgaatcaaaagttgtctgaaatggaagaaagactaaaagtttgtgcagaaaagttgagaaaatacaagtcttcacagaatgagctctatatgattgagcg

SEQ ID NO: 2948 - DNA, 347 bp, Cyanidium caldarium
  Clone ID: LIB190-058-Q1-E1-C12
agcccacgcgtccgctcatgggagaaagctctagtgagttgaaggtggcagaaacttgggacagaaccttggaacttggtattaagagagttgcatatggagtacttgtaggctcagtaactgctttgatcttattccgttctcccttgacgagagttgctgtttcgagttttggaggtggtgtagggtttggaatgacttatagtgacgcaaaacgggattttgaaaaactcaaacctgcagtctcttctcagggattgaccgaggacttgtctatgaatagttgatgaggtggtggcggcggtggtcgtcgtgaataaaagaatactcgttgttctcctttgaaa

SEQ ID NO: 2949 - DNA, 358 bp, Cyanidium caldarium
  Clone ID: LIB190-058-Q1-E1-C6
agcaatgacgctcattaaaagtgtggatgctcgagagattctagactcgagaggaaatccgacagttgaagttcaagtcactactgaactaggtgttactcgtgcagctgttccttctggtgcttcaacaggagttcacgaagctcacgagttgagagataacgacaagtcgaggtttctaggaaagggagttacaaaggcagtacaaaatgtgaagaccgaacttgcaaaagctgtgattggtatggattgtcgggaccaggcagcgattgatcgcaagatgatctctttggatggaactccaaataaaagtagactgggggctaatgctatacttggagtttccatggctgtttgt

SEQ ID NO: 2950 - DNA, 368 bp, Cyanidium caldarium
  Clone ID: LIB190-058-Q1-E1-C8
agcccacgcgtccgtcactgcagacgctggtgccgcggacgctactcctattcaagcaggctccgtaaagaagaattcttttgtagtgttgaaaggttttccgtgcaaagtggtagacatatccacctcaaagacagggaagcatggccacgcaaaagccaacatagtaggtattgatatcttcactggcaagaaatacgaagaaatgtgtcccacctcccacaacattctgcagccggtggttaaccgcaaagactatcagttggtagatattgaggacgatgggtttgtagttcttatggatgaaaacaacgagacgagatcagacctgaaacttgatttggagaatgatgaagtacacaagaaga

SEQ ID NO: 2951 - DNA, 378 bp, Cyanidium caldarium
  Clone ID: LIB190-058-Q1-E1-D1
cccacgcgtccgcccacgcgtccggtccctgaaaagatatagagacatatttatgtatgtaaactctccctccttgtcctcgtcgactggaacgagcctttccaacgctccttgtgctaatactttgcatcaaggacaagagagtgacttgcaaagcatcgtcgcaagcaaacgctatgaaagatatgtgagcaactcagaatgcccacaaaacttttttccttgttatcttcgaaacagatgacctatttttttgatttccaactcgtcgttgaaaagtgaacggggcttaaggctttctgttcgccgacaagaatatttgaagatacgaatttgtcggtttaatgttgtcaatatttattgcttcagcaacatcat

SEQ ID NO: 2952 - DNA, 360 bp, Cyanidium caldarium
  Clone ID: LIB190-058-Q1-E1-D2
agcccacgcgtccgcccacgcgtccggttgcaagaggtggttttcgaagcatgatcgttgtatgcaccgaagaagacgaagaaaccaaagtgctcaaggacaaggtggaactgattcaagttcctgaaacagtggattgtcttcaaaatttactcaatattattccattccaacttttaagttatcacttggcagtgcgaagaggtcacaatgtggaccaacctcgaaatttagccaaatcggttaccgtcgaataaatggcgaattgttccatgtggaggaggtttggttttttgtggcttgggtcaacccttgaacgaaaaatatctggttcatttattaaaagtattggtaacaatc

SEQ ID NO: 2953 - DNA, 366 bp, Cyanidium caldarium
  unsure at all n locations
  Clone ID: LIB190-058-Q1-E1-D3
aggtaaagcgattttttgggaaaagatgatttcaagtcgcgatgatcgtgatcaagatgtgtactggaaatatttggagttttgcgaccgccacaaagttgaatatgacccaaccgtttgtatgtctttgtacgtacaaactggttctctacagttttcaaggaaatcggaaggtcaacaagttattcctctgttggaattagcgaaagaaggacacctttcatgggtggaggaactttcatacaattgccgtcgtttatcttctctcgtttcaaccttgttggtcaagttgtgtgaggcactgcctcagttgaagatgctgaatctgtctggaacgtntcttggtgacgaaaattttgttgcact

SEQ ID NO: 2954 - DNA, 357 bp, Cyanidium caldarium
  Clone ID: LIB190-058-Q1-E1-D6
agcttctaccagaacagcagtatgtgaaaaacaaagggaaaccaagaggaagagtttgcaaggaatcaacggaagagaaacatccgacgagacacaagttgaatcatgcaaaaccacgagataaggagattttggaagaagaggaaatcttcaatttactagaagcttttagaaagtattttccagaaccaccgagcaacttgagagctcaggagataattgaagtaggtatttgcatcccttggcttttgaataattcacaggaaaacgagtaggtctggtaggttctttacggagaaagaacagtgggagctgtgggaaaacgttttgaagccttggagtcgaaaatggtactca

SEQ ID NO: 2955 - DNA, 389 bp, Cyanidium caldarium
  Clone ID: LIB190-058-Q1-E1-D7
agcccacgcgtccgcggacgcgtggggccgccactacggctactagccaatattctagtttattaacctttctaagaattggtgcctttgtgtttggtgtagctgcaggttttggaagtgcttcagcggaccatcgtaaaagagaaaaaattttaatttctaaaattcacgagcgcaatgccaaaattgaggcgttggaaagtgaactaaagcaactgaaaggggaaattccagcttctacaggtgatccagttcaagattggttgaatcaattggaataagatgtatatgttacaagtgccttgtggaagagagagatagtcatttgaataaaattagttcttttcccaacaaaaataaatgggacactcctaaaaaaaaagggccgg

SEQ ID NO: 2956 - DNA, 354 bp, Cyanidium caldarium
  Clone ID: LIB190-058-Q1-E1-D8
cgacccacgacgtaagatccaatatgagtaaacgcaacaactactttgagttgcttaccgctcgtcaactactgcccaggggtggattccatacccgttacagtcaaaacaacggaccttcgcggaaccctgacaaatacgacaaaatcctatgtttccatcgaaccatacggaagcttctttaccacttcccgaattctgcgtaaacttaaatttgagagactaagactctgctttcttcacactcaagacaaccaggttgcgaaaccagggtaaccttgacgagcgactcgttagtctctcaccacccctcctgtctacgtgcttgaaacgtgtgcctctgccgcccttcgt

SEQ ID NO: 2957 - DNA, 397 bp, Cyanidium caldarium
  Clone ID: LIB190-058-Q1-E1-D9
cccacgcgtccgcccacgcgtccgacaagttattcaacaaaaatatgggacttgtgggcttcttccaaagaacactattgtcaggcaaacacaaggatatatatccattggttggttgcgtctctctttctcttattatggcaacattcttatccgttgactaactgctccacaatccaactgtattatggaaaaagtctgaacgcgaggcctttgctcgtaacgaattggagaataaagaacgatggtctattcggttccttaagcaatttcgagaccaccctattacggtgttcaaatcactggaattccatacgcagagcaaggaataaggatcatctgtaaataaatgtccatctctgttgtgttttcataacgatgcaatgtctctcacttc

SEQ ID NO: 2958 - DNA, 367 bp, Cyanidium caldarium
  Clone ID: LIB190-058-Q1-E1-E1
tcacgttcctagttgcaataatcggctctgtaatatcgtctgccactcctctaagtgaaagatggcaaagttctacctcctgccaagagacatgtaagacagtctgtattcaaacgcagatatgttcaactccaacacctacaccaactccaagtgtttctgcgcaacaaggaaacgtataccgctggagtgagacgtatgcaactcctactccaacaccaactcttgtttgtacttatgttccgcagtgcactcaagtttgcagcagcaaatgcccaagtcagacaacttctgccgtagaaagcaacagttatacctcctcttctactcaatcgtctaccacatcaacatactattatggtgctgg

SEQ ID NO: 2959 - DNA, 276 bp, Cyanidium caldarium
  Clone ID: LIB190-058-Q1-E1-E10
acggaatcgtattcttatgaatatggatgccgaagtacaaaatcagtgggaactgattggttccaatgtacatgagcacgactttttcttttgacaagagggacgatgctatgccatgcagacatatgaatatatatagatatacacctatgcatatgtacatatatgcatatatatatgtatgtatccagatttatagagataatacatgggatccatagagatagatagtttgtacagataaaggatcgatagaaatttggcgcaaaacccagc

SEQ ID NO: 2960 - DNA, 341 bp, Cyanidium caldarium
  Clone ID: LIB190-058-Q1-E1-E11
gacccacgagtcagcccacgcgtccgcccacgcgtccgggagagtcttttatggtagcaactatttgttctctgtttcgttcagctggacttggcgtcatcgtgtttgaggcctttctacttacttccttggtatacccttaagtgattcagataggaagccttggttggatgagttgatccgagttatccaacaacgggcagtcgattcgcaaagagaagcccgacacagttactgcattttttgtgcttgtagtgttctaaagttggcttatccaccatatttgaaaaacgctttacgccaatcagtaaccaaatgtactttcagaccttttgactggg

SEQ ID NO: 2961 - DNA, 391 bp, Cyanidium caldarium
  Clone ID: LIB190-058-Q1-E1-E12
cccacgcgtccgcccacgcgtccggaaatttcgaaaccgtcgtttcattttgtggcttgcttttcttttctttcaagaatgagcaagactttggactcacttgacgattttcggtttgaagcaggtgttacacctttctcctccttttggattccctgtgttacctgtgttctttattttacgctcactagagttttcaagttgttggtttcgaatcgaaaaccccttcgttccccttcattattgtttttttacaatggctgtttaagtttcttctcttttattctctttattgctcttggtgcagttatttttgaaaagtccaaactctatacccctcatgagttggtttgtggctccgctacccatcaggatgggcggcctcagttta

SEQ ID NO: 2962 - DNA, 383 bp, Cyanidium caldarium
  Clone ID: LIB190-058-Q1-E1-E2
gaatggaagcccacagaatacatttgttccaggttgcattcaactagccgaagagaaacaagtgtttattgtgggcgatgagtttaaatcgggacaaacaaatatgaagtctgtgctagtagagtacttagtgggtagtggaatgaaagtggagtcgatcgtgacttatagccacttatggaacagcgatatgtttcagttgactgacggagaaatgtggaaaccagagtctgccgcgataagtagagttattgaagatagtgtcagttccaatgggactttatacacggaagatgaaatgccggatcatgtagtagtagcaagatatgtgccttcgtacggatattcgaacagtgatgtcgccgagtacctgactagaactt

SEQ ID NO: 2963 - DNA, 346 bp, Cyanidium caldarium
  Clone ID: LIB190-058-Q1-E1-E3
aggtatttgttcctcttgcaaatgctgcaggtcttggaagccgcatgtatgagttgggtgacctgagtttgagaatattgttccctcaatcctacttaaagttcgaaaagtggcatttatttattcgagaccaagcacaagatgtactttcttccgcgcaacgtgaacttcttctttgtcttatgagggacccatttttagtccgtcttgctgaacaatttacaattactggtcgcacgaaggacatggtttctacttttattaaaatgctcaaacaaaacaagacaaaggagcagatccttgactttattgcaatgagagttattattcgattgcgaccaggagt

SEQ ID NO: 2964 - DNA, 409 bp, Cyanidium caldarium
  Clone ID: LIB190-058-Q1-E1-E4
agagaagaagagcgtgcgtggaggatggattccgttattgcactagttgggaaagactttgttttatcagcagcagatactgccaacgcgcgttcggtcatagtaatgaaagacgatgtggacaagatattggagctggatagtcataagaccttagctatgggtggggagccaggtgactttgtgcagttcacggagtatatacaaaagaatcttcacctttacgaattccaaacgggattgcaactaagtactcacgcagttgctaacttcatccgtggggaattggctagattgatacgggaagcccccgtattaaccaacctacttttggggggttatgattctgtgtccgggccttcactgtattacatcgactatcttggtacttttggaaaactagactata

SEQ ID NO: 2965 - DNA, 361 bp, Cyanidium caldarium
  unsure at all n locations
  Clone ID: LIB190-058-Q1-E1-E5
aggcaccaaatggctccaaccgattgagggtggtggaaagttgacgtctgctttgccgcctctttttggtatctctcttgtgttttgccttttcaaagcttgaagactatttattctgtaatgttttagaggtttcttcggagtttttttgtactagtcttattccatgcttcgtggtgggtgaaaggctcctttcacaacagcgttgtcatgatcccgccaatctctacatcttcaattgccaacttatgcgcgtatatataagtatatttgtacagactcatggtgtagaaagaagagtgcaatggttgaaaagtaacagcaaggtactaaggtacctgtanaggaagcacttgaaaaa

SEQ ID NO: 2966 - DNA, 341 bp, Cyanidium caldarium
  Clone ID: LIB190-058-Q1-E1-E6
gcaacgacgtccggtgagacgggattccatttcttaaagaccttgaaaggaagaccaggataacaagacgtttcacaggagttcatcatcagacaacaatctgtgaactaacactgggacaagtattggtctgtacggttccacgaaattggaagacgaaatacgtgtaattcccgtaccattgacaacgcgtcccaccgtgtaaagcaggacgccccgagagagtagagcgagtgaccagataagacgcgagtctaatggatgatattcggtccactccatctaaggctgaatcagtatctgttgaaaaagaatctcaagatatggcctgacgagtggaa

SEQ ID NO: 2967 - DNA, 342 bp, Cyanidium caldarium
  Clone ID: LIB190-058-Q1-E1-F1
agcggacgcgtgggcggacgcgtgggggaagtgaagacgtaagacgtgaaaaaaaaagcccagaagccaagataaggtatcaaagtaaagaaagaaggaaaaggagaagaagagagggtaggcttagaagcagcaaaccagagaggaaagcgttaaagcatgaaagaaaagaaatccgaaaaagaagagaaaaaggtaagaaagaggaccgaatcagggtaagaggtagaggagcaagaagagaagagagaatgctgggtggagtagcgaaacaagagaagggaagtaaaaggtaagaaagaggaaaggtttacgagagaaggaagtagaaagaagagagtg

SEQ ID NO: 2968 - DNA, 387 bp, Cyanidium caldarium
  Clone ID: LIB190-058-Q1-E1-F11
gacccacgagtcagcggattttcgtctttgtcttcgtcatgtcggacctcaacgaaagaccgttgacgacctcttccgtactgtacgctgcagcaaaggagataggtttgcgtcattatttgttatagatagctttaaagagtttatgaaatcataggaagacgatgtgccaaggagaatcgggattttttggaatgtaagaatacggaggaaaacccggaaagttgtcttggacagggagagaaggtgaccaactgtgtgctgcagttactcaaagatttgaacgcaacctgcccacgagagtttgaagaatacagtgcgtgtcttgataggcaatcaagccaactttatctgtttgatcgttgtcgaaagtttgaaagaaaccta

SEQ ID NO: 2969 - DNA, 404 bp, Cyanidium caldarium
  Clone ID: LIB190-058-Q1-E1-F12
ggtatcgctttatgttcgttcccaagttgtaccaccttctagtggtgaggaagaattggactatcctcgaatactcaacgcagtacttcctagcggtatatggatcactggttggactagtgtggatgcagaattccacgctcgattttcagcttcttaccggacatatcaatattactttagacctgaaaatttgaatctgtgtgctatgcaacgtgcagcacaattttttgtaggtgaacatgactttcgtaacttttgtaaagcggacgtttcccaagtccaaagttttcgaagggttatctatgcctgcgatataaagatagttgaaatgacgcacaagaatatcatagagaggcaactacttgagtcgatggaaagccagccgcatcgattggacaact

SEQ ID NO: 2970 - DNA, 321 bp, Cyanidium caldarium
  Clone ID: LIB190-058-Q1-E1-F3
agccatcgtccctcgtcgtctcctccaacgagtaccaaaacataaaatagaaaatggcaactttactatccaaaaaaagaagagcagtagccgacggtgttttcaaagcagaacttaacgagtttctgatgcgagaattgtcggaagagggatactctggtgtagaagtgaaacccacgccgttgcgaacggaaatcgtgatccgagctaccagaacacaaaacgtgttgggagaaaaaggtcgaaggattagagaactcactgcgttggtacagaagcgattccgttttcctgaaggaacagtggaactttatgcggaaa

SEQ ID NO: 2971 - DNA, 417 bp, Cyanidium caldarium
  unsure at all n locations
  Clone ID: LIB190-058-Q1-E1-F6
aggtgtgtagcaagcgtagagcagaagaactgggtgtaaaggtcgagtagtagagtaagtgtaaaagggaaaggaaaggagagaaagaggaaagggatgaaatgcagagatctctagagaaaggcaagaaagaaaagaaaggaagacacagtaaatgaggcgagaaagcataggaagtgaaacggattaggaacccgtgtagtctatgcagtaaaagaaagaatgagtaagaaaaaagggagtcattccaccaggggagtaaaggcgcaagaaagaaacccaaagcaattgacgggaatcggaaaaaggggtggatcacgtaaattaatccgatttaaaccgagaaccttacctctccaagaaagtgttgcacggctgtcgnaagaacgtgctgtgaagtgagagaacgtacgagaa

SEQ ID NO: 2972 - DNA, 354 bp, Cyanidium caldarium
  Clone ID: LIB190-058-Q1-E1-F7
aggcatgatgaagagcgctatgaagttctttgtatttagcattattttggcaaatgttgttcttactattcaagcagcaacagttttggagactttggagtcactgaaatatacagagtatcttgacatggtaaaggctgcaggcctggactcgaggtttaacgactctgctgtgacatggactgtttttgcagcaaacaatactggagtcaatgccaccttggcaccaaagcacttggttatttctaatatcacatctaatgcgacggagagcaaagaaattgttgaatattatgtcaaccgtacaattatgtcggatgagattaagccaggaacaacgatccttacagcttt

SEQ ID NO: 2973 - DNA, 419 bp, Cyanidium caldarium
  Clone ID: LIB190-058-Q1-E1-F8
agcgtttggaacgaagcttgacaaattcccgacaacttgcagaggtttggaataaggcttaacaaagacgtatactctttgctatggaaaaaatattgcaagttactccaaaggaactctcctttcgtctggaactgaacaaaccccttgttcaaactcttaagctgaagaatatttctgaagagacacttgcctttaaggtgaagacgacacaacccaaaaggtactttgttaagccaaatgcagcagtaattggaccaggacaggagatacaagtttctattgtgttgcagcccttaccagaattacctccagacgcaaacagttgccgtgataagtttctactacaagtgatcaaagtagacaaaggagcagaatccgacgttcaaggccttgtgaaaaatgtgtcgccagacgtt

SEQ ID NO: 2974 - DNA, 352 bp, Cyanidium caldarium
  Clone ID: LIB190-058-Q1-E1-G1
agccaacgcgtccgcccacgcgtccggatagcagtatggcacccaagggatccaaaagtgtacccgttgctggaaaaaagcccattggtaaagcagaaaagaaaaaagccaaaaagaagcgtgcagaatcttacagtatttatatttacaaagtgttgaaacaagtccatcctgacactggtatatcttccaaagcaatgagcatcatgaattcctttgtcaatgatatatttgaaaggattgcttccgagtctagcaagctggcagcatactcaaagacaaaaactcttacttcgagagaaattcaaactgctgtacgccttttgttacctggagagttgggcaagcacgc

SEQ ID NO: 2975 - DNA, 326 bp, Cyanidium caldarium
  Clone ID: LIB190-058-Q1-E1-G12
gacccacacgtccgcccacgcgtccgcccacgcgtccgcgttgtggcaggtttccgcgcaccacgaccaacaaaaggacacgattatttatgtgaagctctacttattgattcaactcattacgctccgggagaggaagttaccgtgggtttggtcaacaagtcaacttcgaaagttaaccctggcaaatggttaagtgaaaatcctccggttaatggcggtaaccttccaaagccatgaaccaaactggcaccaaagggcccacttgaagaaagttgtgttgagcttattgatggcgaagttgatgaagatattggagttgttgc

SEQ ID NO: 2976 - DNA, 354 bp, Cyanidium caldarium
  Clone ID: LIB190-058-Q1-E1-G2
tcccggggacgcaagtggcacgacggaaggtagattgggaagaaggcaagagagtgaagaagctgcttcttcaagtggaggagacgttccagttcccaagatacctctcattcgtcctcttgtaaacaggcgtgctgcagtctatcaaataatctcgaactttatttcttcatacactccttcaaattcgtcaagttacgacgtgcgtccctctgtgtgttttgccccccaaatgtatgggagtggcaaaaccatattagggaagcactttacggaatttgttttgttgaaccggcaggttttagagaagtatataatcgggtttcctggaattgctggcagtggagtgagcgc

SEQ ID NO: 2977 - DNA, 281 bp, Cyanidium caldarium
  Clone ID: LIB190-058-Q1-E1-G3
ctgcctcttcaagtggatgagacgttccacttcccaagatacctctcattcgtcctcttgttaacaggcgtgctgcagtctatcaaataatctcgaacttgatttcttcatacactccttcatattcgtcaagttatcacgtgcgtcgctcagtgtgttttgccccccagatgtatgggaatgtgaaaaacagtattatggaagcactttatggaatttgttttgttgaacccgcaggttttaaacaagtatataatcgggtttcctggaattgctggcaa

SEQ ID NO: 2978 - DNA, 382 bp, Cyanidium caldarium
  Clone ID: LIB190-058-Q1-E1-G6
agcggacgcgtggggattagttgtagtggtgttgtctttgcagtagcgtgatactaggatgggaggtttcggctactttttaaagtcaactttgttttctggcagacacccggagattattccattggtttccgctattgctctgtgtggagtttgtgcggtttttgtgagcatcgacaacttgttttataatccaaccgtggtagctctcaagtcagagcgggaagcgtattcgcgcaatgagaggcaacgtgactatgaagacagaccctttttgaagctggtgaaaccacttcgtgaccgtcctatcagttttatttccccaaatgatgaaaatagcaggattcctcattagttggatagtaaaataaatagttgttga

SEQ ID NO: 2979 - DNA, 324 bp, Cyanidium caldarium
  Clone ID: LIB190-058-Q1-E1-G7
gacccacgacgtcagcccacgcgtccgcccacgcgtccgggaaggaggccaaaatttggcccaagatctgaacgagctcatcttttggttccacagacatgtcgaacgacaatcagtctgagaagagcactttgaaagaagcggaggagaagctgcagagtgcagttcatactggaacagagaaagtttctcaggtgttgagcgacgtcaaggaaactgtgacggagaaatagaaggaatggacagcgccaaaaagtagccaagaagaagcataagattaagcacaagatgcgaaagaagaggctaataaagcttttaatgcta

SEQ ID NO: 2980 - DNA, 371 bp, Cyanidium caldarium
  Clone ID: LIB190-058-Q1-E1-G8
cttttatgaggagggtggctgggagtttttaaatcctgattcttcagaggaaggctcaggcaaggaagaagatgaggagtctagtgaagcgtcgtataatccatcggatatggagtctgaggatgattccgaggagtatgaaccagatgacgatgtggatacgaaggaacttgaagagagttctggtggagaggccgaactaagttcagaagaagaaggcttagattgggatgaaatggaaagacgagccgcagaagaagacaaggaaaagcgtcgctttccggaagacgacagagaaacgaacaaatcccgcaagcgatcgcgtcgttgacgcatcgtcgtccttgaagaataaattcaacgcattttct

SEQ ID NO: 2981 - DNA, 414 bp, Cyanidium caldarium
  Clone ID: LIB190-058-Q1-E1-G9
agcattcctgcacgaagagcaaaaagatgattggattttgttgttctgtcgttggaaataaactatggagtcagcaacagtgcaaaggttgttttttatcgtttgctttcaaaagaaaagcagtaactcgacatgtcaagttgtttaaaattgtagctggacaacacacgacaaacaagcaagaaacctcttccaccaatcccttggagagaacagtagataccgagcaggcacaaggtttgcataatacttttgaagaaaaacctttgaatgaaaccttggatagaacgcaaagatttgtaccaattatggcgcccaacaggtgaagaactttttaggcagtatcggattccgttcggcctaaccaacgaacagttggttgaaaagttgcaactgttatcagaaagcatagaa

SEQ ID NO: 2982 - DNA, 377 bp, Cyanidium caldarium
  Clone ID: LIB190-058-Q1-E1-H1
agattggagaaggaagtagaatggttcgtgagttgttcgtgatggctcgcgaacatgctccttctattatctttatgtatgagattgattccatcggttcaactcgtatcgattcgggaaattcgggaagtggtgactccgaagtccaaagaaccatgttggagcttttgaatcaattagatgggttcgaaccacaccagaacatcaaagtactgatggcaaccaaccgaatagatattctggatcctgcgttgcttcgccctggtcgaatcgataggaagattgaatttcctaatccaaatgaagacgccagactcgatattttaaagattcattcaagaaagatgaatcttgttcgaggcatcgacttgaaaaag

SEQ ID NO: 2983 - DNA, 416 bp, Cyanidium caldarium
  Clone ID: LIB190-058-Q1-E1-H11
agcggacgcgtgggcagtggaggaagctggagtatctggaaagattctttgcaagttgggcaagtggaaaggctcgaatgatcaaaagttgatcatgtacttgctattagtagaacaagaactgacaaagaatgacaccagatggaaagagaggaatgagcgacctcggagatggttaacgtttgacgaagcagagaagactattttgcaagtggagagtggtattcgaaggcctgagctaataagaatgcttttaatagcgaaagcaagaataatgactttggacaacaatccagagtcttattccacggactcttctcctgaagaggagaataacgaaaaggaattttaacgtgttgttgttgttgttgtataatatacatatatatatgtgcgggtcaacaataaattcttat

SEQ ID NO: 2984 - DNA, 331 bp, Cyanidium caldarium
  Clone ID: LIB190-058-Q1-E1-H12
acccacgagtcagcccacgcgtccgcggacgcgtgggcgattttgcgcaacctttgcatcccctaatggttggtagagacggcggaaaagcgaagcctttgaagaagccaaagcctacttcgaaggaactgacggaggaggatttggaatttaagaaaagacaaaaggaggagcaggccaagttgaaagcagctcaacagcagttgaaaggaaagggcaagaagtgactttgcttctacgagttagctaaacaaacgctttatttgtttctacaactattcgggtactttttgatagtttccgtgaacaagaattaaacattctttctcgt

SEQ ID NO: 2985 - DNA, 421 bp, Cyanidium caldarium
  unsure at all n locations
  Clone ID: LIB190-058-Q1-E1-H2
agcccacgcgtccgcccacgcgtccgcggacgcgtggggcgtaactttgtgggtttccttacaagatgtcttttatatttcgtggaatcaaaggcctttccaatcctcgttatggacaacccgtggatttacccaccggaataatgtatagcttgaagcagatgtcgttcattgtccagtttgctttttctgttgtagtcattgctatgttctcncaagttaccttttatctataccgtgactttaagtgtgctttcgatgggcattgggattacgccacgcatagcgaagtgtctggtcctgtgggttattgccgttacttcattgctttggggagcatttccatcgtacttttagctattgttgccgtagctacttttggaacgctgtattttgaagttcctatggactatatccttta

SEQ ID NO: 2986 - DNA, 374 bp, Cyanidium caldarium
  Clone ID: LIB190-058-Q1-E1-H3
aggatattcgagtactttgtcaatctggcaattattcttcattaaccagccatactagtcagtatgatggtgcagaaagttatgcgctttgcgactcgaatcaagttctccaaggtgtccatgcaactatttatagtgacgataattatataggaagcgtacgtggatactgtgtgtcagtcaatacttcaagcattgcaagtcctgattccttgatgatgaagaaacctccagtatcattgagaagcattcgagctcgttcctgaatggcgttgctgtgtggataactgcgatatacatatatatatattcaggtatccacagctcatttattcaggatgaacaatcacttttcgtagttgtcgtgtgtcgtg

SEQ ID NO: 2987 - DNA, 376 bp, Cyanidium caldarium
  Clone ID: LIB190-058-Q1-E1-H4
cccggcccaagccacacggcaaagtcaccagccaccgttctcgtgtgatgttcgcaagcaaagcaaaagagtggcgaaaacaccccgacataagtccgtggacaaactttaaggcttgctttactggttttggaacagccttggcactttttaccggttatgttgtttttaaacaggcctaatactatttttacaaccctacacagacgcaagtccccgagacgaaatcggaagaacttggctcctgagtttcgtgttcttgtaaagttggaacctcacgtctatccctacatggtgtcaaagacaggccactgataaggctaaagttttgtcctcgttccttgggccaaagtaataaagagtgttatgttttctc

SEQ ID NO: 2988 - DNA, 373 bp, Cyanidium caldarium
  Clone ID: LIB190-058-Q1-E1-H5
aggggcgcgcaacttccatcactgtctatggtcaaagtggttggctgtccaccgtttcagtcaccacctttatggttatctttttcgattatcagtggtttatgtatattcacttcagtaacctttgtacaagttgatatgggagtagtgttggaatggttccgaaggctttccctatccatatttcgcacccgtggagttttgcgtttggcttgtggtatggcttggggtgcccatctgtttgaagccttggtagcatatcgaatatgtacaagacttggtggtggaaaagatacgtggaaatggacgatacaaactttttgcgtaggatatccttcccttcgtttgttgcagaaaagggaaaggaagacga

SEQ ID NO: 2989 - DNA, 389 bp, Cyanidium caldarium
  Clone ID: LIB190-058-Q1-E1-H6
aggattgtgaaaaatgtttgcagctagatcctcaatttgtaagagcttatgccagaaaaggtgctattcatttctatatgaaagaatatcataagagtttggatgcctatcaacaaggacttcaagtggatcctaataatgcagaattgaaggaaggattgcagaaaactttgagtgctattgcagaacaacaacgctccgagaaacctgatgaagaacaaatcaaacatgcaatggcagatcctgaaattcaaaagatattgatggatcctgtattacaaaatttgttacaagaagcgcaatccaatccttcttgtatacagaaagcaatgtctagtccaggaatggcagcaaagatacaaaaacttgttgctgcaggtattttacgt

SEQ ID NO: 2990 - DNA, 382 bp, Cyanidium caldarium
  unsure at all n locations
  Clone ID: LIB190-058-Q1-E1-H7
aatgtcccggctcgacccacgacgtcagcggacgcgtgggcggacgcgtgggcggacgcgtgggtgaagaagcatatcgtgaacaacagcggcgagcagaggaagaaagaggcaaatacgggaaagcagtaaaagaagaaagagaaaggaaaaaactgagtatcaggaagaaaagagggagtagatgaggaaagaaagatcaaggaagtaagagtaagagaaggagtaatgtgaatgaaagcaggaaagtatttgaagaagagagtgtaaagcacgtaccttttgcataatgtcccagcgagtgaaagaggaagcanaaagaaagaaaaagaagtagccaggtaagacccgaagctagttgatcttatgctgtccaagcgaa

SEQ ID NO: 2991 - DNA, 389 bp, Cyanidium caldarium
  Clone ID: LIB190-058-Q1-E1-H8
gacccacgacgtcagcccacgcgtccgcccacgcgtccgcggacgcgtgggcggacgcgtggggaaagaaatgtgggtgacaagttgcaaaggacgcaaggaggaggatcatcgaatatgagagcactacagcaacttgttgcgtttcaacacgatagctttttatctcatcacaaaaagaatatattttatatgccctcttcttctcattgccaaaagtcctcactcaagtggtcttttcctagaagggcggcatctcgtcctttatcttgtcatcaagtatttgaaataacccccgacaaacctgcagttgttgtcgaccaactttgtaaatcattcagaatagcaaagagtcgtgatagtaagcaaccttctcgtgtggattccgt

SEQ ID NO: 2992 - DNA, 411 bp, Cyanidium caldarium
  Clone ID: LIB190-058-Q1-E1-H9
gctttctttgtaggaaatttgcgatgtccgacgatcagacgacaagactcggctctttgtggttgtctcgacaactatgtatctctctatggatgttgtggtgtggaatgaggtactcgtataggttggaacgtttggtcatccattgactagtgaataatactcgattccgtatattttatctctttattttctacttgtacataaaactagttatatgtctggtagctataaaagccctttgccatctcaacatttatattatttggtgttggtgagagacgagatggcaatctccactttgcttcgagaaagtagtgtcactatgacacccaatgtcttgtcacttgaaatataatagaacataggcaatatttcgtgctgcaaaggcacttgatgctgaaataaaaa

SEQ ID NO: 2993 - DNA, 376 bp, Cyanidium caldarium
  Clone ID: LIB190-059-Q1-E1-A1
agcccacgcgtccgcccacgcgtcggcccacccgtccgcccacgcgtccgtgaatatatggcaacgacgggctttgtttcatcgtatcaaggtgttgcgttacgaccggcttggaggaagcaaactatccgaaaccagcaaacaaataccatattgttcagaaaccacgcaaagtcttcgaaagttaggttatcgataccccttttcatgcagcaaacttccaaggatgacgcggaacccgagaaacaatcgagtcaacagggctccaaaatgtcaccaactactaggattgcaggtgatatctttttctttactattactatggcactttttgcagtcactctggcggctactttgtatcgctcctaccttccgc

SEQ ID NO: 2994 - DNA, 423 bp, Cyanidium caldarium
  unsure at all n locations
  Clone ID: LIB190-059-Q1-E1-A11
acgcgtcaggacaacgcgatgagagtaagagtcaagtcttcggtgtatacttcggcaaagaagagatttcagtttttggcttttgataagtcagaaccttggaagtatggttataacaaactacggtatcttcaaggcgaaataaagaataaaaagtggctgagtcctggacatattacttcgaggaatgataagaagtggcataaagttcgacacgaaagtgactagtgtgcttgtcacaaggaggaaggttgtgcaatgagagcccaagtaatccatcaaaggagctgaacaaaaggtgctttgaattcggaacagtctcttgagtaaaaataaagaagagcggtaactcaaaancaactggcaaataaataccccttctttatccagtcttttataggtatgcgctccaaaatagtcacg

SEQ ID NO: 2995 - DNA, 420 bp, Cyanidium caldarium
  Clone ID: LIB190-059-Q1-E1-A12
agccacgcgtccgcgcctttcactggatccataatttacatcattagtaggattgaatttgaccatcaccaagaattcttcaggtacatttgtaggtcctttccgagtggtaaaacctgatgtcgctgttggctcatcctttatcgatgtgattgatggagttcttgttccaccaccaccaacttccgccacaagtgctccaactgctgtaacttctgctcccatcactacagtttttccaagcagcgtaaccagtgcaccaatctctacaggaattccaagtggtgttataagtactagtgttcccactagtgttgctggtgttcccaatggagcttctattatattacctcaagcttgctaaatcggtatagttgggtattgcaaatgtctcgctgtgtgtgtgttggtgtgtgtgtg

SEQ ID NO: 2996 - DNA, 393 bp, Cyanidium caldarium
  Clone ID: LIB190-059-Q1-E1-A2
aggaagaaaacgatatatgggcaattcagctggttgtgagtacaagttataataatgaagtttccagtcactttacggagaagcagaactgggtaatgaatacaggagtctatcatgagaggcgttttgaaaagaagggaccttcacctggtgcttggcaagacgcgagtagttccaattctgataaagaaggtctccatattggcccaaactgtcaacttgtagtttgctctgttgataacctgaaagacttcttgggtcagcaagtttatgaacaactccagaaagtatactcggataatgaaagcgttttgatgaagttggatcctctcgcgaagttgttgggaagaaatcttgaacgattatggaggagcgatgttcctgtggtgcccg

SEQ ID NO: 2997 - DNA, 406 bp, Cyanidium caldarium
  Clone ID: LIB190-059-Q1-E1-A4
agagtcgaaccagaagttcttatggacggcgatcacaccattgaagactcacaaagagttacggagagagtgttgtacgaggtatatcatgcgttacatcaacagcatgtattattagaagggactcttttaaagcccaatatggttcttccgggttctgactgcaaggacaaagcttctccaaagaaaatcgcagagtatacaattcgtacgttacagcgtactgtgccagctgccgtacctggcattgtctttttatcaggtggacagtcagaagaagaagcttccgtgaatctcaacgccatgaatcaagtggagatgatcaagccttggaaactttccttttcttacggacgtgctttgcagtcttcatgtctgaaagcgtggcaaggaaaggcagagaatg

SEQ ID NO: 2998 - DNA, 377 bp, Cyanidium caldarium
  Clone ID: LIB190-059-Q1-E1-A5
aaggggtttggcattggacactatatggcaagaagcgacgacgaatacgactatttgttcaaaattgttcttattggagattccggggtcggcaagtcaaaccttctcgcgcggtttactcgcaacgagtttaacctcgagtccaagtccacgattggggtaaaatttgcgacgaaaagtgttcaaaaccgaagggaagacattaaaagcacaattatgggacactgctggtcaagaacggtaccgtgctatcacctctgcgtattatcgaggtgccgttggagcacttctcgtatacgatatctcgaagaaggaatcctttattggtgtagaaaaatggctaaaagagcttcgtgatcacgcggatagtaatatag

SEQ ID NO: 2999 - DNA, 375 bp, Cyanidium caldarium
  Clone ID: LIB190-059-Q1-E1-A6
agcaaattgaacaaatgatggattcgtcttgctcttcccaggctcaagcatcgagcgacaacctgcgagagttttttttttctgtgtggtaaactgaaggagacaaaacggaaaggttggattgatcaccatgtccgtcaacccgagtccgtcagcgatcatatgtaccgtatggctttgatctgtttttgtttagcaccaagtcacttaaatcgagaaaagttaataaaactagcactggttcatgatctaggagagtctctggttggagatatcaccccacatgatggtgtctcgccggaagaaaagaagaaactggagaccgaagcgttttgcaaaatacgagacgaatatttatcgtcttgtgcagttggt

SEQ ID NO: 3000 - DNA, 358 bp, Cyanidium caldarium
  Clone ID: LIB190-059-Q1-E1-A7
agcgttttggtgcagttgtacattcaacatcatcaaatgccaaagggaggaaagaaagattcttcaaagaaagaagccacaagtaaacctgcagcagcagatgctacaaagacgacagaaaagtctggtccggaagccaagttgaagggaactggtgcatagaaacaatagaaagttgactatgcatgttcctgttatgttttgtgagttctgtttgatagtttccagctattcttttggtagtgaataaagagaaaaatttttagatttacacaatcaccccacatgatggtgtctcgccggaaagaaaaaaaggaaactggagaccgaagcgttttgcaaaatacgagacgaatat

SEQ ID NO: 3001 - DNA, 427 bp, Cyanidium caldarium
  Clone ID: LIB190-059-Q1-E1-A9
agaaataaacaaccaccatcaggaagaacaaccattcaaggagtccgcgtcgaaagaagtcaacgacaagttcgaccaaacctatgccgaaagcgttgccaaggaaatcatagaaagcaccgtgggagaagagaaatacgaacacacaaagacagtggaatggaccaatcaaatgtgtgaaaaaatactgagcaagttgttggagctgcaaaagcctttcaaatatatagtctcttgttctttattgcaaaagaaaggagccggattccatactgcgacgacgtgttattgggatgccgaatgtgaccaatgctgtactgtcaaacatgagaccaaatacttgcacgtcataagcaccaattaagcgcggttcaattcactagtcaaagtatcattctagcccgcacacaaatatgttcaactcgta

SEQ ID NO: 3002 - DNA, 370 bp, Cyanidium caldarium
  Clone ID: LIB190-059-Q1-E1-B1
aggaagaaaagagagagaagaaagaaaagaagagaaaagccgtactgaagaccgacacaagtactcgaggagaaaggagacccaaattaaggtgagagaatggacgataaggaactaagcaaaaggatatggtatctgcggtagaacatatgaaagaagcagcaccgactgtttagcaaaaacacagcactctgcagaaaagagaaaatgtaaagtatagagtgtgcggcctgccaaatagtagagaagaaatcgatgaaagtgaaagcgagtaaaagatgaggtatagagaatggcggtcctaacagtaaggatccaaaggtagcgaagtaaatagacgtttgaaaggcgtccagtatgaaaggagaaa

SEQ ID NO: 3003 - DNA, 310 bp, Cyanidium caldarium
  unsure at all n locations
  Clone ID: LIB190-059-Q1-E1-B11
ccggagaaaaaaaagaaaagaagaaaaaaacccttctgaaaaaccacacaagttctccaaggaaaaagggaaccanatttagggtaaaaaatggacgataaggaactaagcaaaaggatatggtatctgcggtagaacatatgaaagaagcagcaccgactgtttagcaaaaacacagcactctgcagaaaagagaaaatgtaaagtatagagtgtgcggcctgccaaatagtagagaagaaatcgatgaaagtgaaagcgagtaaaagatgaggtatagagaatggcggtcctaacagtaaggatccaa

SEQ ID NO: 3004 - DNA, 343 bp, Cyanidium caldarium
  Clone ID: LIB190-059-Q1-E1-B12
caagccttcagccaagccttcggccaagccttcggaaattcgttgctttgggaattaaggctgaaaaggagaattatttcgcttccggaccctgaaacaaacactcatatatacatatacatatattttctatagatatagctattcttcaaatggtttccaaaaagacgaaaaaatccactgaaacagtctcttcaagattggctctcgttatgaaaagcggaaagaccacgttgggcttgaaaagtacgttgaagagccttcgtcagggaaaaacaaaactcgtggtcttggcaaataactgtcctcctcttgtgcgctcacagattgaatattactgtct

SEQ ID NO: 3005 - DNA, 397 bp, Cyanidium caldarium
  Clone ID: LIB190-059-Q1-E1-B3
gaccacgcgtcagggcaattcgaatcatctacttaaagacacctttttccccttcctacgcacgaacgctcgtaatatgttgtttcattgctctgtaagtttatgtacgaaaattatagaaaccaaagaaactgcatatcttgaacgatacaaaggtctttggatcctttggggaatagtcctaggtggattcagtgaaagttgttactgttccccggaggtcttgtgaaccatcagctctagtatagtgacttttgcatacaaactattataaaagtatttcacggaaagtattgaaatttttgactttgcagtttgcagtcgtccagtaaacactagattactagttaaaaaatgtaaacgttaagtaataaaatacatgttcaaacgaaaccaa

SEQ ID NO: 3006 - DNA, 402 bp, Cyanidium caldarium
  unsure at all n locations
  Clone ID: LIB190-059-Q1-E1-B5
cgctggttgtataggagacgttggctggtatgtggttcgatttattctatcatttgttggatacgatcgtaaagttatttcggtgtatgcagttggcaatgaaacggaaggaggatcgatggacgattgcgcaggagttgtggagtttgaagagaacattactgcacactttgactgtggattcacaagtggttatagacaatggggtgaatgtttaggtacacttggaatgttgagagtggaacgttttcaaggagctcccgttcctaataatacagaagagaaggatcccaatttgcacttccagtttcgtcaacttggagaagaaagaaatggccgcattgaaagggtagaaagggaaaccaaagacatttgggttgcaaatgttgggnggaaaacaca

SEQ ID NO: 3007 - DNA, 282 bp, Cyanidium caldarium
  Clone ID: LIB190-059-Q1-E1-B6
cccacgcgtccggagtcagagtcatttgttcgaatgtttgaaattggtgccggtagaaggagtgcttttagtttgtatttggatgaagacgaataagaaagtgacgaagaggaagaagaagaagacaaagaggaagaaatgggcagtgagtatggaatgagtagtgattctgattccagtagatttatgagttatgacgaagaagaagaagatagttcagatgacgaagatcaagtctctgatgttcccatgtttggcctgatcgtacatgaagaagaaatg

SEQ ID NO: 3008 - DNA, 367 bp, Cyanidium caldarium
  Clone ID: LIB190-059-Q1-E1-B8
agcgtatgcaggaaagaagaaggtaaaggaagagaaggaagaagcagagagggactatgagcgagaaggtggatagtcgatagggaaaaagcccataagccaagataaggtatcaaagtaaagaaagaaggaaaaggagaagaagagagggtaggcttagaagcagcaaaccagagaggaaagcgttaaagcatgaaagaaaagaaatccgaaaaagaagagaaaaagggaagaaaagagggagtagatgaggaaagaaagatcaaggaagtaagagtaagagaaggagtaatgtgaatgaaagcaggaaagtatttgaagaagagagtgtaaagcgcgtaccttttgcataatgtcccagcgagtg

SEQ ID NO: 3009 - DNA, 439 bp, Cyanidium caldarium
  Clone ID: LIB190-059-Q1-E1-B9
cgggtcgggccacgcgtcagcccaagcgtccgcccacgcgtccgcccacgcgtccgcaacatcatccgtcagaaatgcaaagtaaatggagtatggagcaaaaagaatatgaagctcccaaagatgttgacgaaatccaagaacaacaacttccgtttatccaagtgtggaaacatggccactcagatataactgtttgtagaatattcggagtgtgtattggctcaaaaggtctccgtgtattccagaatactagtaaggcaaaaaaacaacttgaatactgtggaatcaaacctcatctttatgaaagcagtggagttgaagagtggttaaaaatatcagcaatgtctaactattcaattcaacttgaccaagaactccgttcctaatttgccttaaggaacacatatgccccatttcattgaagatgtaaccccct

SEQ ID NO: 3010 - DNA, 383 bp, Cyanidium caldarium
  Clone ID: LIB190-059-Q1-E1-C1
agcccacgcgtccggaatccagtgtttttcagcttaatctttgcagtgtctgtagttgcagtggcatgtccttgtgcattgggtttagcaactccttctgcatttatgactgcttctagtgtcgctgttcgttatggaatattgcttaaagaaagtatcgtagtacaatatctataccacgctgcctgtatcattttcgataagacaggaaccctgacttgtggaaagccaaaggtctcagaagttcaaggtcttaagatagttgcaggtctcgatattgacaagataataagtttggttgctcaagtggagagtcactcagaccatccttatgcaaatgctattgttcgttacgcggaagaaactcgaggtttgcatgtttc

SEQ ID NO: 3011 - DNA, 418 bp, Cyanidium caldarium
  Clone ID: LIB190-059-Q1-E1-C10
agatcattccagtgctattccagtgaacaaaaacggcaatgacttttgtaatgcacctttcgctcaatgtcctcaagatacttactactttgacctcgtcgataaatccgataacctttccatcaaattgtattggagatgggcacccgagttttccgatattcaatgtcccatgaaagttccttctggttctgttcccggtcacaattatagttttcctagtggtccagatactgtttcatgtgatatcaatatcatggacgctggtcaatgggaattgtttgcaaaggatgccaatgtgtctactgcaggctattctcaaggcataagtaatttgagcaaatgtttctcttccgataagagtgcccaatacttttggattgccgcttatgcattgacaccttcccaactgaaaatc

SEQ ID NO: 3012 - DNA, 317 bp, Cyanidium caldarium
  Clone ID: LIB190-059-Q1-E1-C11
ccggccaagccttcggccaacccgtcggccaagcgtccgggaagaaagaggcaaatacgggaaagcagtaaaagaagaaagagaaaggaaaaaactgagtatcaggaagaaaagagggagtagatgaggaaagaaagatcaaggaagtaagagtaagagaaggagtaatgtgaatgaaagcaggaaagtatttgaagaagagagtgtaaagcgcgtaccttttgcataatgtcccagcgagtgaaagaggaagcaaaaagaaagaaaaagaagtagccaggtaagacccgaagctagttgatcttatgctgtccaag

SEQ ID NO: 3013 - DNA, 416 bp, Cyanidium caldarium
  Clone ID: LIB190-059-Q1-E1-C12
agtggaagaagtcgcctactttggtgccaagtacgaacgattccttggataacaacttgttgcttgacttgggttaaatattagtatttacaagaatggctagtgtttcgggtcttcctcgaagaattataaaggagacggaaaagttacttcaggatccagttcctggaattagtgctgttcctcacgaagacaatgctcgttatttcaatgtgattatccagggtcctgattcttccccttatgaaggaggaacattcaagttggagttatttcttcccgaagactatcccatggctcctcccaaagttcgtttcttgacaaagatatatcatccgaatattgaccgcttgggaaagatctgtttggatatattgaaagataaatggagtccagcattgcaaatacgaactgtt

SEQ ID NO: 3014 - DNA, 409 bp, Cyanidium caldarium
  Clone ID: LIB190-059-Q1-E1-C2
agcccacgcgtccgcattgttgaattttcctgtttcgtttacttgtctttttgttgagttatcatggcacgaacaaaacaaacagcacgcaagtctaccggtggtaaggcacctcgaaagcacttggcaaccaaggcagcaagaaaatccgcacccgtaactggaggagtgaagaagccccatcgttaccgtcccggtactgtcgccctgagagaaattcgcaagtaccagaagagcactgaacttcttatccgaaagttgcctttccaaaggttggttcgtgaaattgctcaagactttaagacggacctacgtttccaaacttcggcggtgactgcccttcaagaagcctcggaagcatacttggtcggtttgtttgaagataccaatctttgcgcaattcatgcca

SEQ ID NO: 3015 - DNA, 389 bp, Cyanidium caldarium
  Clone ID: LIB190-059-Q1-E1-C3
cgaccacgcgtcagcccacgcgtccgttttttttatttttcagtttcgtctatttgtcgttttgatgtgttatcatgggaccatcaaaataggcagcagccaagtctactggtggtatggctgctccaaatcacttggtaatcaaagcaacaagagcgatccgcacccttaactggaagagtgtcgaagccacatcgttagcgtcacggtactgtcgccctgagacaaattcttctgtatcacaaaacgactgaacttcttatcggcaagttgcctttccaagtgctgattcgtgaaattgctcaagactttatgaccgacctacgtttccaggcttcggccgtgactggccttcaagaagcctcgggagcatacctaatcggtttgtt

SEQ ID NO: 3016 - DNA, 392 bp, Cyanidium caldarium
  unsure at all n locations
  Clone ID: LIB190-059-Q1-E1-C4
agcacgttcataggagtgaatataacgttcttcccgatgcattatttgggattaggaggaatgccacgtaggataggagaatatgcggatggatatgagggatggaatagggtagcgagttatggatcgataataacggtgttatcgatgttatactggatgtggttggtagtgaagagttgggagaagggtaaggagagtgagttaaggtgggaaggaaggagtatagagtggggtatgagtaggataggttatcataactggaaggaggaggtgatgttagtgaaggggatggggtaaggccgagtangaggaggtaatggaatttggatccgtgtggtggtggttcgagtccacctaccccagtgggggtaatggagaagagaagaaag

SEQ ID NO: 3017 - DNA, 433 bp, Cyanidium caldarium
  Clone ID: LIB190-059-Q1-E1-C5
tcccggctcgacccacacgtcacgcccacgcgtccgcccacgcgtccgcgtgtctccatttgctgtctctcgacgctcattcgatcgtcgctttgtagcaacctaagagacttgtttttttctcttttgctttctcttaactacggtacaggtattgggggtttggtgaaagtattgccaaagggaaagagtcacttacgttcatgggtacacgtaaagctcgtgatgggggcttgccttttgcaacctctccaaagaacctgggagtatcacttccaacaaatatggagcgaaatggaaagcgacaggaaactgtgtttcggtctgcgaatagaaacgaacagaaaacggaaagcgtcaagaaggaaagtacccctctagcttctatgtttggtgatgactcttcggaaacagttgaaggaaaaatctgtgg

SEQ ID NO: 3018 - DNA, 399 bp, Cyanidium caldarium
  Clone ID: LIB190-059-Q1-E1-D1
ccggctcgaccacgcgtcagcccacgcgtccggtaagaaaaaagggagtcattccaacaagggagtaaaggcgcaagaaagaaacccaaagcaattgacgggaatcggaaaaaggggtggatcacgtaaattaatccgattaaaccgagaaccttacctctccaagaaggtgttgcacggctgtcgaaagaacgtgctgtgaagtgagagaacgtacgagaaagccaagtgaggaaaagaaggcaagtaaagggcggcccgagaaaggaaagggcgtaagacgtgatacagagtaggaagaaaagagaagagagctagaaaggaggtaaaagaagagtaaaaggactagaagaggtacggaattcacgaggaaggagcgtgaaggaaggaggaatccca

SEQ ID NO: 3019 - DNA, 380 bp, Cyanidium caldarium
  Clone ID: LIB190-059-Q1-E1-D11
tttcgtacgaacctcgtcttaagagtctgttcaaggccacagtgctatgttgcgaagcttggtgcttaaccatccacgttgagcttttatttttatctctggtctttctcgtataggacactgataggcaaaaacctcggacacttgggactttcgaggtctatcgtaataaacactaaatttgtaaagttatctgctgcttgcagtcgaaacttcaggatgccttgtgttgaggcatcagctggtgcttggttgactaagattcttccaaaaatatcttggatacctagaggaaaaaaatccatccaaaaaatttctaagccaaccagccaatcaagacaagggcagggaaccacgacagtgcttgcttgttgacacag

SEQ ID NO: 3020 - DNA, 405 bp, Cyanidium caldarium
  unsure at all n locations
  Clone ID: LIB190-059-Q1-E1-D12
ccaagccttcgccggacccttgggcgggaaaattcgggtttccgtggttgtgttggttgtggtgttattataatatgccttctttacaagaagatttgcttcatccagatcccgcggtggaggcacgaaaacacaagttgagaaggcttgtaccgagtcccaactcgtttttcatggacgtcaagtgcccaggttgttttcagattactactgtctttagtcacgctcaaacggtggtgatgtgtggaaactgttctactgttctttgtcaacccacaggtggtaaagcaagattaatggaatcctgttcgtttagaaagaaagcggattgagtgaaagtgnacaagtccgctgtcatagaaacttaagaggaaatccaacaaaaagtctagtatccacgaggtt

SEQ ID NO: 3021 - DNA, 145 bp, Cyanidium caldarium
  Clone ID: LIB190-059-Q1-E1-D2
caagccttcggaaaaaaaaaaaggaaacaaatcaacaaagaaaataaaagaacaaaaaaaaaaacaaaaaacaaataacagaaaacaagaaaaaagggtagatcaaatggggggaatccgaataaaacgataaaccttacatcgg

SEQ ID NO: 3022 - DNA, 365 bp, Cyanidium caldarium
  Clone ID: LIB190-059-Q1-E1-D3
cgcgtcaacccacgcgtccgataagaaaaaagggagtcattccaccaacggactaaaggcgcaagaaaaaaacccaaaagcacttgacaggaatcgcaacaaaagggtggatcacgtggggggatccgcttaaacccaaaaccttaacctcggccaagaaggtgttgcactgctgtccaaagaacgtgctgtgaagtgagacaacgtcccagaaagccacgtgaggaatacaaggcaagtcgagggcggcccaacaacggagacggcgtacgacgtgataaacactcagaacaacccagaacacatctacaaatgaggtaaaacacgactaaaacgactagaccacgtacggaattcactacgaa

SEQ ID NO: 3023 - DNA, 408 bp, Cyanidium caldarium
  Clone ID: LIB190-059-Q1-E1-D4
aggggaaaatcccgttcaaattaggctaagggtgcttggtattaccggcatggttcttttcgagtttgacgaagaagacttgctgtcagcagatgacactatttttaacgtgggaaggtctggagatgagtggtggaaggagttgagttgggaagaaagcaacctttttcgagtagcgtcggaacagagcttgagcggcttggcaagtacttctggaattgccgagtttgactcgaggaagcttttttctggagtgcctaagaaggaatttaaagaaggtggcgagacgacagtgattgattatttgtcaaacgagttttatccaacctccgcccctagaatatccgaaccttgtgcgtcgtctagctattcacacgcaatgcctccaacagaagcgtcgttgaattc

SEQ ID NO: 3024 - DNA, 406 bp, Cyanidium caldarium
  unsure at all n locations
  Clone ID: LIB190-059-Q1-E1-D8
agtgtttgttggtgtgtgtgtggaatgacgagtgtccataccgaagacacttcaaattgggaaaaagtattcttgcggttagaaaaaaggttccaatatttggaatatctagaaaaaagtgcgttggatcccaatatactcgtacctgcgtggtatcgagacaatgtgcaaaatactttgccgttgttatcccttttgttcgagcgtttggaacaagaacatgtggtagatattgcagaagaggatttcgatggccatatagatgatagcattcagcacaagatacaggaactagaaaaatggaaccaaaaatggaagtcgttggaagaattggcatcgatggttgcgaccacccaatgacgangaggaaaggagacacgataataagaccatattttcatttttc

SEQ ID NO: 3025 - DNA, 291 bp, Cyanidium caldarium
  Clone ID: LIB190-059-Q1-E1-D9
agcaaaaaatggggaaaggacaagctttgattcaaacaaatgaatggttttcaggtttatcgggattgaacggtaataacactgatgaagaagaaccgactttgtgattgcttcgtcactgtagtcttttattttgtggatgttcacagggtgccattcatgctgtttaatgatggagttgttagtaataattgttgaatatattttaggattttagtaatctaaaaaaaagccatgttgtttcttgtttgggttttgataaaggatgtgacggaattatttgtcttgtgg

SEQ ID NO: 3026 - DNA, 391 bp, Cyanidium caldarium
  Clone ID: LIB190-059-Q1-E1-E1
gaccacgcgtcagcggacgcgtgggtttgtgattctctcaagtggggacaaccatataacaatattatggcagacacagaactacttgcagcgattcaggaagttttaaaaaagtctcttatggttgatggtgtgacgagagggattcgcgaatccgttcgatgcattgaagccggacaagcccaactagtcattcttgcggaagattgtgaccaacctggaataccagcgttggtagaagcgctttgtgcggaacaaggtgtcaacttggtaaaggtaccggagcgaaaacaactaggagaatgggctggcttgtgcaagattgatcaagaaggaaatgccaccaaagtagtagcttgttcttgtgtggtagttagggactttggagaac

SEQ ID NO: 3027 - DNA, 393 bp, Cyanidium caldarium
  Clone ID: LIB190-059-Q1-E1-E10
agcaaaaaacataaaatatgtcttttcttttagaacttttaaaagaaattcgctggagaggactttggggaacttttcaagcagccaaaatgaatagactgggtacaatgaagtactttgtcggcgaagacgagtttcacaaccgatactttcaaaaagtaaacgatgttatgttgaaggatcgttgggtggaatatgcttctaaggaattcactcctgatccttattcgttacctcctgagtggtagtagaatacttgtctttcgtttactttttcttattttctaggcatgcctggctgcatcatattatagatgagccacccacaaaagtaggtttccagagaccaaagtatcaagcacagatcgtcgcaaaccgtacaggcacaacagt

SEQ ID NO: 3028 - DNA, 423 bp, Cyanidium caldarium
  unsure at all n locations
  Clone ID: LIB190-059-Q1-E1-E11
agcaaagctcttccttatattctttgtgcttggacaatggttgcaaagactgctctgagttgcctctttctctctttccttatcgctgccgcagttgcagccgacgtagtttcagaggagagatggggatatgctcagcaaacccaacaacagcaacagtgccaacaagtatgtaaacagtatgcatactatcagagtccagtctgcacttccgtaaccacacagagcccatactggacccaatgctcgaagactgtgcaaacctttgtcccaagccagtgcagtacttatacccaatctcctacatggacctattgcagcacctacaccaccactagcgtaccatctcaatggaacaagggccttgactacctatactcaaacctgctgtgcttatgcccaacanacttcctatgcagtcag

SEQ ID NO: 3029 - DNA, 419 bp, Cyanidium caldarium
  Clone ID: LIB190-059-Q1-E1-E2
ctcgaccaacccttcagcaaaatatttaccccggaaacataataaatatggggctgataatgtaaaaaaggctccttaacaacatgatgtttgacatgggcatcgatattcagaacatgtatgtaaagttcatttttgacgagaatcacaagcaaaagaaaggcgagtttgtgcaagaggtgaaagggaagcttgatttggtggagaagtttatgaagcgtcaagggaaaccttatttggcaagcagtgaacctacgtttgccgattatctcatgtttgaggttttggacgtgatcaagagacaacaggaagatattttgaaagatttcccgttgttgcaaggtttctatgaaaagatgggtagccgtccgaacattgttgcgtatcgtaaatccgaccgtttctatgagaaacctgtt

SEQ ID NO: 3030 - DNA, 410 bp, Cyanidium caldarium
  Clone ID: LIB190-059-Q1-E1-E3
aggtcatattgaaggttttcataatattccattggatcaacttgcttccagagtgacagaagtaagtaagataagatatgaatttgtattaaagttttgagatgattagattcaacaacaagtcaaccaaggaaagcgcattttggtgatatgtcgtcgtggcaatgcgtctcaacaagcagttgccttactgtccagttggaatattcatcctgtatacgacatttttggtggtatagaagaatggcggaaacaatgtgatccttcacttccttattattagatgataacagcatactttctttatttggatgccacaagtttctcgacgatggaaacacatcgatgacaaagttgtggatgtgtttcattttgtaagacagtcgtggaaaagttccaacatcgaatgc

SEQ ID NO: 3031 - DNA, 279 bp, Cyanidium caldarium
  Clone ID: LIB190-059-Q1-E1-E6
cgactcaagcgtcacgcccacgcgtccgcccacgcgtccgaaattgagaagacattggaatgggcgcgaaacaataagattcttgccaactagagtcgatgcaaccattaggaaagattgtgtaagaataataccagcgaacaacggagtaaataatgtttgatgagagaagtgaaagggaagcttgatttggtggagaagtttatcaaacggccggggacaccttaggttccaagcattgataccaggtatgccgattaacacatcttcgaagttttc

SEQ ID NO: 3032 - DNA, 357 bp, Cyanidium caldarium
  Clone ID: LIB190-059-Q1-E1-E9
acgcgtcagataaaaccaccgaaagtgatatacctgttgaggactccattatttcagacctggctgaaaagacacttatgtgttgtattgaattattgcctgaaaatgagattcgcgagaaaactttatgtttgaaaacaattgcaagttcgttggacgttttatcaatcaactctaagaaattgttgccagttattccttctaatttgaatgcagtaaataaggagttgacgacttggaacgtgagcgtcagctctgaacacccgaaaagctcaatcaacgacgatggacgacgggactcgcttgtctttagttgtcgccaatcagaagaagaatcgctttctaacaaacaatacg

SEQ ID NO: 3033 - DNA, 408 bp, Cyanidium caldarium
  Clone ID: LIB190-059-Q1-E1-F1
agacaatacagaagttgtgcctgttgcagatgtcggagaagttccaagtgtcgtgtttcattttaccaaaatcgcgaacctggaaaacgtgaatgcaggagaattctgtgatgtacttggaatagtgaaggatgtttcggagttgtcttctgttgtttctagaactactggcagtaccctggtcaaaagaacagttgttttaatggacgataccttgaagtcaattcgacttactttgtggaaagataatgcagaaaaattactcacctctgctgaaggtaatcctgttttgctctgtaaaggagttcgacgcggagactttaatggaatctcattggatgccactactcagtcctgttttgaagtaaaccctgatattaaagaggcacatgagttgcgtgggtggta

SEQ ID NO: 3034 - DNA, 413 bp, Cyanidium caldarium
  Clone ID: LIB190-059-Q1-E1-F2
ccggctcgaccacgcgtcagcccacgcgtccgctgacggttactgtacccaagaaacaggtggagaaagcagaaagccaaaagatagagattgcgaacgagtagagcaccttgagtttgtttgttgtgtatagataaacattgaggttgtgtttttatttttgtaaaaaaaaaaaaaaaaaaaaaaaaaaaaaaaaaaaaaaaaaaaaaaaaaaaaaaaaaaaaaaaaaaaaaaaaaaaaaaaaaaaaaaaaaaaaaaaaaaaaaaaaaaaaaaaaaaaaaaaaaaaaaaaaaaaaaaaaaaaaaaaaaaagggggggccccccaaagggttcaaacttaattaaccggtaaaggaaatttaaaacccctcaaaaatggcccccaaattcaatttcccggccccttttttaaa

SEQ ID NO: 3035 - DNA, 402 bp, Cyanidium caldarium
  Clone ID: LIB190-059-Q1-E1-F3
agagaaatttctacgcatactttaaatagccatgtggatgtcggtgtatcgtgacaagatcgtggattgatcaacaaccaacgagagcaagcgagctactatttggcgtgtcatcatgagcgagttggttcgacctggtcgtttctttgatagcagttttggagacttgttttcatgggcaaccgaccctttttatcgagatatctggtctatcacaccacgtagttttgaaggtcaaacatggtcgcctaggatagaccttgtagagaaagacgactgtttcttggtgaaagcggaagtacctggagtaccaagggaaaagatcaatgtagatttgaaaggtgatattctaacgataactggggagaaggaagacgagaaaaagtcggatgaagaacggga

SEQ ID NO: 3036 - DNA, 269 bp, Cyanidium caldarium
  Clone ID: LIB190-059-Q1-E1-F5
agcccacgcgtccgcggacgcgtgggcgaggcggcaaaaggaacaaatggttgttttctgtctctttctcactctcgatatatgtatatatatatatatatgtatgtatatatatattatgcactgttgtcatagtgtctgtgtaaaagcaacctattctttatcgagacaacaacagcagtgaccattctcactgaataaacttgtttaccaaaaaaaaaaaaaaaaaaaaaaaaaaaaaaaaaaaaaaaaagaaaaaaaaacaaaaa

SEQ ID NO: 3037 - DNA, 407 bp, Cyanidium caldarium
  Clone ID: LIB190-059-Q1-E1-F7
agcccacgcgtccggcaaaactgccctgggataatgttttgagactatttgaggcaattcgtcttttgatttgaaagggttggaaagaaatagagcctaaaaagtttccgttgtctctttgaaactgttgaagagatttctttgtcctatatatgcagttgtaagagttggaggtatttgaaccaaactcgagagacttcgaggagactcccttttacatagtgatcactagcacgcacgcaagtaattctcccaaaatagggcagttgttacaaacgatatcgaagaaattcaaactcgatcgtcaacgaaactaagatcagggagctgaaatcgtgaatggtgacgatccagaggagacttgttggaactgttaaaacaaagtttagctatcatgcaacttttca

SEQ ID NO: 3038 - DNA, 353 bp, Cyanidium caldarium
  Clone ID: LIB190-059-Q1-E1-F9
agacaacttggccaaagacggttgtcaaagtggcggtggtggtttgagtggcatagtgtctcgcgttcaggttcacacggcaatggaagcgctttaaacgtataccgacgttaggtgaaaacaagtcaactaagagatggggtgcttctcaagtaaagacttccaaagcaacggaaagaaaaagtacggtgtggtattgataggcttggatggagccggagcaaccactatattgtactttttaaagcttggaaagcaaatgatgacaatgccaaccttgggatgtaatacggaaactgtgcagtacggagatagcgaactggtgatatgggatattggaggactcgacaaag

SEQ ID NO: 3039 - DNA, 423 bp, Cyanidium caldarium
  Clone ID: LIB190-059-Q1-E1-G1
gacccacgcgtcagcccacgcgtccgcccacgcgtccgcccacgcgtccgatttgagaacgagattgactcgttggaagagaaaccttggcgggaaaaaggtgccgaactaagtgattatttcaactatgggtttacggaagatacttggagagaatattgtagaagacaacaaatgatgagactttattctcaaagtctgatgcccattcgaactttagactctggcggtcctttccataataaccaacctcattattatcatcatcataataataatatggactcatccggtgaaccaagtcgtaaggtaccacgagcgacacaaaacagaagatacaatcctccgcctccttacaaaagtaacctgaaacttcccaatgaggcaaccgaagccgtggactatgcaaaacccaacgaatac

SEQ ID NO: 3040 - DNA, 430 bp, Cyanidium caldarium
  unsure at all n locations
  Clone ID: LIB190-059-Q1-E1-G10
ccacgcgtcagcggacgcgtgggcggacgcgtgggctctgtgaacgaaggatatagcagtttatggcaacctgaaattagggagctcatcagtcgtttcaagacagaagtttccttgaatggaaaagagagaactttacggtacattggctcaatggtagctgatgttcatcgcacactgcttaatggaggaatttttatgtactttgcgcatcaacaatggccaaatggaaaattaaaattactttatgaagcttcgcctttggcatttattatagagcaggctggaggaaaggcgtcaactggtcttgaaagaatattggacattactcctacaagtgttcacgatcgtattcaagtggtgattggttcctatgaagatgtagaattggttgaacagctttacanaggaccttcaacaagtgatccta

SEQ ID NO: 3041 - DNA, 381 bp, Cyanidium caldarium
  Clone ID: LIB190-059-Q1-E1-G11
taccccttcagaagatcaagtacgagtcttgctctgctcaatatgaagttcaaaagatcaagcagcaacaatgtactatgacagtctctgaacaatacatacagcccgatacttgctacaagtatgtccctgaacaacaattggtgcctcatacttgttacaagtattattctgtacccaagtttattgaaaagtgctatcctcagtatgcaacaacggagaaatgtgtagagtatgagtatgttccatatgccacttctacaccttatccatcggtatctccaagttatactccttcagcataacaaacaacttccggctaataaaaaagccgaaaactggatagatttttgaagtgtctcgtgttcaaagaaaacatga

SEQ ID NO: 3042 - DNA, 423 bp, Cyanidium caldarium
  Clone ID: LIB190-059-Q1-E1-G12
agccaacgcgtccggagagaaaaactattttgcaagcaaatgaggaaaatattcccaaattaataaccaatcctcgtggtgtgaagttcatagtacgtggctatttgcattatattcgaaaagaaggaaccttgtggtatactgcgagtccagaggacaacaagaaggtgactaaattggatgaaaatcgttgggtttgcgatgctacaggaaaggagtattcttattgcaactaccgctatattttatccgttgctatacaagatgcgactggttctttgaatgctaatgcttttgatgatgtcggttcccgcctaattggtcgtccagccgaagatttagccgctatatatgaacgtgacaaagcagaatttgatgcattaattgatgacgttctttttaagccgttcatctttcgaatac

SEQ ID NO: 3043 - DNA, 108 bp, Cyanidium caldarium
  Clone ID: LIB190-059-Q1-E1-G2
agggcaaatccaaaaataagttggcaaaaaaaggtccgggtcccaccccgtaccggcaagaaacttaccggctttggcacgtaacttttccaaaggccggccccccaa

SEQ ID NO: 3044 - DNA, 383 bp, Cyanidium caldarium
  Clone ID: LIB190-059-Q1-E1-G3
gaccacgcgtcaggtaacaataaaatacaaacaggcaaaaactgcgtctcaggactcacaagaggcagtatataaggcaagaaatttcacgggattacgtttcaaagaacgagtcctctaaatgtgggcaggaaagtatctgaagaacagacttgtaagcaccgtacctttgcataatgtcccaccgagtgatagaagaagcaaacaggaagataaagaactatccatcgaaagacccgaatctaattgatcttatgctgtccaatccaagtaacgctgaaccagtatctgtggaacaagatttggtatacatggcataacgggtgatatgccaaacaaagctattgatatctggtacgcctcgaaagctatataagtagcgt

SEQ ID NO: 3045 - DNA, 416 bp, Cyanidium caldarium
  Clone ID: LIB190-059-Q1-E1-G6
cgaccacacgtcagcccacgcgtccgcaaatgtggacttgaatttagcgatgtgttttagtttttcccctggttctcgactcctgttggtacgacaacttgagtagctttctctcattttgtcaaagcagtcttcttgttcttcttgcgtccagtcttttgttcgcgactagcctgcttgatttgccttttaaaaaagttacagagtgatgtatccgcccctatttgttgtgttcccttgaacaaagagataggttgtttaaagcaagataaggaagcgtttgatggacttgaagaaattttatatgcggtgcaccgccacgaaagcgccccaaacgaacgtccttgcacaagagagatggacggtcttaacgccaacagccgaggactctttgtatagcaagtgcctgtggcttt

SEQ ID NO: 3046 - DNA, 407 bp, Cyanidium caldarium
  Clone ID: LIB190-059-Q1-E1-G7
agcggacgcgtgggcggacgcgtgggcggacgcgtgggcggacgcgtgggcggacgcgtgggttacattgtgggttgtggagtaagtgcgcttggcaacaaactaaaagatggaagaagaatcatcggagcttatatgtctgacgctactgtagcgtctctatttagtgtgaaaatgttgttctaccttacaatacttgcgttctctatcactattgtgggtcttatgggtaagagttccgacggtatttgggttcacagtgttccagcgaaatacgaataatggtcaataaaattcttcccttcaagtaaaccaccacggcataacttcctattgcaagtatatcatggctgtagcagctattggtttggttatcagcttcttcgagttttggtatgcattcctcg

SEQ ID NO: 3047 - DNA, 421 bp, Cyanidium caldarium
  Clone ID: LIB190-059-Q1-E1-G8
tcgacccacacgtacgtgtcatttcaatgattggtctaaacagaactcgaaagaagtgatttcttaatacgtatgaattgactcaaaatttgtctaccgacaacttcaggagtataactagccataataattctctttgcttctagtacacggaggcgaactgtatctctgtccaaaataacttgtcgcattctcaaccttaaatgagagatggaaggaacggctaaatgtaaccctttgtaaacttccatctctgcactgtttccagaataagtttcaagacgttctactctaattggaaaacccgttttttctccaaaatattccgtatgtccgctccagttagtagcaatcactggcagttcgtaatatattgcctccatgataagacgtgcccagccttcccctcatgttgccaaaa

SEQ ID NO: 3048 - DNA, 357 bp, Cyanidium caldarium
  Clone ID: LIB190-059-Q1-E1-G9
cacgcgtcagcggacgcgtgggcggacgcgtggggacatgtcgaacgacaatcagtctgataagagcactttgaaagaagcggaggagaagctgcagagtgcagttcatactggaacagagaaagtttctcaggtgttgagcgacgtcaaggaaactgtgacggagaaatacaaggaatggacagcaccaaaaagtagccaagaagaagcaaaagaaaaagcacaagaagcgaaagaagaggctaataaagcttttaatgctatgaaagaaagtgcgagtgccgcttcagaggctgcatcagagaaagcagaaaaaattaagcaggagttgaaggagtgaagatacacagtagtttt

SEQ ID NO: 3049 - DNA, 414 bp, Cyanidium caldarium
  unsure at all n locations
  Clone ID: LIB190-059-Q1-E1-H1
agtcaacatttaataatacaattgtaaacataacagatataaacggtaatactattgcttggtcttctgctggtcaagttggatttaaaggagctaaaaaagccacaccttttgcagcacaaaccacggctgaaaaagcaggtaagcaagcaatagaacatggaatgcgccaaacagaaataagaataaatggtcctggttctggtagagagactgctattagagctttacaagcactgggtttgaaaataacaaccattaaagatataacacctatacctcataatggttgcaggcctcctaaaagaagacgtgtttaaaagaactagatataatttatgttattttattatataattatatgaaaaagttacagattgaatgtctagaatcttttaatcanaacccaacaaa

SEQ ID NO: 3050 - DNA, 439 bp, Cyanidium caldarium
  Clone ID: LIB190-059-Q1-E1-H10
cccacgcgtcagcccacgcgtccgccacaaggcgccatcatgagcggagaagggacacaaggacaattgtttcctgggaatacaaaacaagtaattgagaatccgaggcagaataacgatgatcgacccagtgtttatgtcaatatgacagatgacgctgttagttggctgaagaatacttttcaaggagttttgaaaccaacaaatcctgttgcttcgaacaacagtaataataataatagcagtggtatggaaactacccttactgccaacattgtacagcaaattgtaaagcgacttgctacgatggagtcggagcttacagagttgcggtgcaaaaatagcgctcttgaaagagaacgagaaattcttcttatggagaatgagagtttacgcaaagtgttggaagaatggaaaaaaggtggaagacctgtatgaa

SEQ ID NO: 3051 - DNA, 339 bp, Cyanidium caldarium
  Clone ID: LIB190-059-Q1-E1-H11
accacgcgtcagccacgcgtccgtttcgctcatcgtgcacaacgtccctggcaaagtcaagtagaacctgcagcagaagagcagaaacctacctacgaccccaagtgttatctgtgcccaggaaacagtcgtgcgggtgggaagcaaaacccgaaatatgacgaaacttttgtgtttacaaatgattttgctgcactgttaccagatacaccatcctttgaacaacaagatggcgctgatcaagatttgttaaaagtagaaggagtcaagggaacctgtaaagttatttgtttttctcctcgacacgactggactgtagctgaaatgtcggtggactct

SEQ ID NO: 3052 - DNA, 391 bp, Cyanidium caldarium
  Clone ID: LIB190-059-Q1-E1-H12
ccacgcgtaagccaacgcgtccgcccacgcgtccgttaaatactaacttggttgcttagtaaatttgcatgttatgaagaagctattcaaaaccccaggaaggatgttcttttcttaaccaagacttttcaaagtgagtttcaccgaaaggccatatggcttcgagaagacttttgtggcactgcagctatatctcgtgaatttatccgatcagactttgaaagatttgctgttggagtagatatagattctgtagctatagactggtgtctcaaacaaggtttattgagtcttccgtctggtagtgatagacttgagctagtagtagcagactgtagagagtatgaggataaaagatcgtatgacgttatttctgccaacaactatagct

SEQ ID NO: 3053 - DNA, 408 bp, Cyanidium caldarium
  Clone ID: LIB190-059-Q1-E1-H2
agattatggagaataagactgtaaaagaactaaaattccttgttgtccaaccaacaactctctcaaaaaactaaacacaaatagccaaataactggtgaaatatctaccccacccactggttgtgctacctttcgaactggagcaaggaaaggttccgtaaccaaacatacccacacccacggaaactttagactatactttttaggataccaacttagaacaattcgcaaaaccatcaagatgaccatcactgaacaactccagttggtgatggttgcaacatagcccaccgccgtatgcaccttttgttccccaatagaagcagcaactctagctattgtgcttgcttgagagtcgtccccaaagtggtcgcttttcattgaccaattgtacgaaagtctccactt

SEQ ID NO: 3054 - DNA, 406 bp, Cyanidium caldarium
  Clone ID: LIB190-059-Q1-E1-H3
agcccacgcgtccgagttagctcaaaatgttttaaaagaccatcgggcatccattttcacatttgtgtttgttgaagagcagcatgatgaagagcgctatgaagttctttgtatttagcattattttggcaaatgttgttcttactattcaagcagcaacggttttggagactttggagtcactgaaatatacagagtatcttgacatggtaaaggctgcaggcctggactcgaagttcaacgactctgctgttacatggactgtttttgcagcaaacaatactggagtcaatgccaccttggcaccaaagcacttggttatttctaatatcacatctaatgcgacggagagcaaagacattgtggaatatactttgtacaaccatactcttttgtcagatgatat

SEQ ID NO: 3055 - DNA, 403 bp, Cyanidium caldarium
  Clone ID: LIB190-059-Q1-E1-H4
cgcgtccggtgactttgatagatatcattcattttgctcatccatccaatagcacaattctgttatccgatgctcaatattctgcattccgggaacaattaaaagcgatgggagtgtcgaataatttgagccacataggagaaaagaagaaagaaaagaatactcgatttgttgctgttggtttgttgcagaactgtaaagtatttcatacgagaagaggagactgtatggcaaattttgagttgagagatgcgactgcagtttgtctagtcacaatgtatccacgagtatatgctcgagtatctcatcttttgatggaaaatgaacactttgcagttcgtttaaatgtggagtgggagactggaaattccagtcaattgattgtcaagaacttggctcgact

SEQ ID NO: 3056 - DNA, 353 bp, Cyanidium caldarium
  Clone ID: LIB190-059-Q1-E1-H9
aggtagaaagaacgtgctgtgaagtgagagaacgtacgagaaagccaagtgaggaaaagaaggcaagtagagggcggcccgagaaaggagagggcgtaagacgtgatacagagtaggaagaaaagagaagagagctagaaaggaggtaaaagaagagtaaaaggactagaagaggtacggaattcacgaggaaggagcgtgaaggaaggaggaatcccaagtaatcgaggaagaaaaagcttcggtgaaagcgtgaacggattttgtacacactgcccgtcaagttctggaagtgtgctaggaataagcaggaaagtatttgaagaagagagtgtaaagcgcgtaccttttgc

SEQ ID NO: 3057 - DNA, 336 bp, Cyanidium caldarium
  Clone ID: LIB190-060-Q1-E1-A1
cccacgcgtccgggaggtggttcaggagatgaaagttaccacgcaagggaacaagaaaagtttttgcctactgccaacattgcaagaattatgaaaaaggcacttccaccaaacgcaaaaatagcaaaagacggcaaggataccgtccaggaatgcgtttcagagtttgtaagttttataacgtcagaagcaagcgacaagtgtcagcgtgagaaacgaaagactataaacggtgacgatattttatgggcaatgaacacgctgggtttcgacaactatgtagagcctcttaaaatctacttggcaagatatagagaagctatgtctgcagagaag

SEQ ID NO: 3058 - DNA, 349 bp, Cyanidium caldarium
  Clone ID: LIB190-060-Q1-E1-A3
gatcacgcgtcagtactttggctggttctggtgcattcccgataggttgatgttaacaaagaagttagctttggagactctaccagcttctgttatggaacttgtggaagacgagtatgttgcaatcgcgttattgctactttttgagcataacagaggagactcatctttctttaaatcatatttggacatattaccctcacacgacgaaatcaaccccttgttttggtggtcagatgaagatttactgctgttacaaggcagtccaactttagctgcttgtcagcaactgagagaaaaacttgtgagagagtatacatatctagagaaccatattattccacaaatc

SEQ ID NO: 3059 - DNA, 169 bp, Cyanidium caldarium
  unsure at all n locations
  Clone ID: LIB190-060-Q1-E1-A4
cgcgtcagggcaacattgccatttccttttggagggaaaacacaagacaacaatgtctcgtcncaagtgtttctttgatattgctatcggtggacaacctgcaggaaggattgtattcgagttgttctccgatgtcgttcctaaaaccgcggaaaatttccgtgccctg

SEQ ID NO: 3060 - DNA, 381 bp, Cyanidium caldarium
  Clone ID: LIB190-060-Q1-E1-A6
agcccacgcgtccggtgctgctctttggacttgccgcctatttctctatacagttgtgttagcattttcagcaacaataattggacttgatggaaggaaggcagataacatatggaacgatgccctatattatcatggaaaagtggtgaacttttgtgcatattcggcttcgtctgtttttgaaggtggcgaccatggcgcatgtaaatatgtgatggctttggcttctatcagcttgattttagttttctttctttggttggcctcctttgtcgacgcattgtatccaattcttacaaagttctggtttgtggagcttggtatcaacatattccttactatgtggtggttggttggtgcaattgtggtgactgcaaagcg

SEQ ID NO: 3061 - DNA, 372 bp, Cyanidium caldarium
  Clone ID: LIB190-060-Q1-E1-A7
agcgctacataaaggagcaccaagataataatgacacaagtgaaaacacgtcgaccgagaaaaccacttccagcaacgataagatagcacttgaagttgagaagacagaatattgggatcaactctacaaaaacaacaggaacaaagaggaaccaaaggaaccagcatcagaaaatatgaaaggaagtgcgtcacaacaaggttccaagtcaaatgttggttatcctttggaagacccacaggcagtccaacaggaagaggagacgccgcaagttgttgacgacaatgagacaaactctcctcatgcaattctacttgaagctagcaaactgcaagcaaaatatggagattgtgataatcttccaaaccaag

SEQ ID NO: 3062 - DNA, 406 bp, Cyanidium caldarium
  Clone ID: LIB190-060-Q1-E1-B11
ccacgcgtacggattcccttggcagcgatgaatcaagttgcaaagattttagagatgcccccgataagagtctatgagattgtaacattctattccatgttctatcgtgaacctataggcaagttcaatgtacaagtttgctgtacgactccttgcatgatacgcggtgcgtatgatattcttcgtgccatacaggacaagttcaatcttgaacccgggggaaacagtccagatatgatgtttcatcttgaagaagtggaatgcttaggagcttgtgtgaatgcgccaatgatgcaagtgaatgatgactactatgaagacttgactgttgaaagcgccattcgagtattggaaaatctgcgtgataacaagcctgtgaaagtcggtcctcagaacggtcgtcatc

SEQ ID NO: 3063 - DNA, 360 bp, Cyanidium caldarium
  Clone ID: LIB190-060-Q1-E1-B2
agcccacgcgtccgcggacgcgtgggcaacaagcggcgggctcaaagggggacaaaagtggaggcgggctctccgatgctctgatgaatggcaacttttcctttatctctttgggataacttctgtcgttggactttgtccgaatatttgactggggtttatagaatatgacctttcgatattttctccatgcatgtacaacatgtgtacataaatataccaactttgtttgaaaacatctttatggaccagtaactgttggaatgcctctcccatcaaaagactaggacttggtccaagcaatgattgtgggagaaatattgtttccattagttgcttgggcttcagtatagttggtgg

SEQ ID NO: 3064 - DNA, 353 bp, Cyanidium caldarium
  Clone ID: LIB190-060-Q1-E1-B3
ggtcgaggcacgcgtcagcccacacgtccgattcatcgtttcgtcttgggttgacaaagaagactggaagttttttcgttgtggaagaagacatattttgtttgaaccagttggaaaagtatgtttgacagatattattgatcgactcattgtgtcgtagctttcatgctctcgtggcaaacttttacgtgtacgtaataagaacactcgtcagttttcaactttgagtgtggaagaggagcagcgctttgtgagggaattttttggcgctattttgggtctttcttatttgccacaaacaaaagttgtgtctgtttcggcagagtttcttcataagctttcccagtcgctct

SEQ ID NO: 3065 - DNA, 368 bp, Cyanidium caldarium
  Clone ID: LIB190-060-Q1-E1-B4
aggaggtatacctagtgaagtatggggacgattacgtacacctgttttaggaattgaagaggctgaagattccatcgaaattgctcgaaaacacgccaaattggacccttttcttgactcttatgtgaaatacagatgttgctctctttccgagttggtctccgaacgaaagcaatttgactgtgtaacttgtctggaagtagtggaacatgtggaaaaacctcagcagtttctcaacttgttggaggcaattgttcgaccacaaggtttgctcattatctccacgattaagcgcacggtcacttcttggctaactgcgatatgcttggcggaaaacgtacttgggtggataacgcgtggaacgcatc

SEQ ID NO: 3066 - DNA, 365 bp, Cyanidium caldarium
  Clone ID: LIB190-060-Q1-E1-B5
agcccacgcgtccgcccacgcgtccggttctttcaggctcgcttagaaagtgtttgcgtccaaagagacaaagtttttgaacaattggccaaagttcgagagttgagaagaaatcttggcgtccttctttcaaaagcaccttctcacgtacaggtaaacattggctgtgacttttatcttgacggcgagttggatgacgaaggtcttttacttattgacatgggaaagaacgtctttgtggaaatgcaaccaaaagaagctctagagactacaatactgagagaaacttggctggagaggctcggtgaatattatacgaaaaggtggaaagattgagttaagctcgttggattgctctactgact

SEQ ID NO: 3067 - DNA, 379 bp, Cyanidium caldarium
  Clone ID: LIB190-060-Q1-E1-B6
cccacgcgtccgcccacgcgtccgcccacgcgtccgaaagcagttgagcacagcaatatcgatatgtcaagtggctggaataactacagtggaacggaaggtaatgggaatgctggtgctggtcaagggaagaacaaggataagaagactagtggagaacttgcaaaagatagtttaaagggtttgggaatggcagccttgtcagcgggtaagctggtttatcgcggtggcaagtggtgtgtggataaggtggaaggcgccattgacgaccacaagtcaaaaggaagtaagagtggccgtggtggaaattcacgttattctcgttgaaacgtaataacgtggatagaaacagaacgagacggttttttatatttgttgt

SEQ ID NO: 3068 - DNA, 97 bp, Cyanidium caldarium
  Clone ID: LIB190-060-Q1-E1-B7
agaaaaaaaaaaaaaaaaaaaaaaaaaaaaaaaaaaaaaaaaaaaaaagggcagaagaacaatagagatataaaattaaatacacgaacaagggagg

SEQ ID NO: 3069 - DNA, 352 bp, Cyanidium caldarium
  Clone ID: LIB190-060-Q1-E1-B8
agcgtagaacaatatgttgatacctaaaaagaaccgaaacgcagtttattcttttattttatcgagtggagtaattgtggtgaagaaggacactcatgccaaaaaacacttgcagcttgacgttcctaatcttgaagttatgaagatatgtcagagtcttacttcgcggggatatttaaaggaacagttcagttggggttacttttattatactctgactgacaacggaatcgattacttacgtcgatatttgaatcttcctgtggaaatagtcccggaaactctaaagaagcctactagacccccaggtgttcgcccttcgtcgtttccatcagaaggtcaagaaaagaga

SEQ ID NO: 3070 - DNA, 395 bp, Cyanidium caldarium
  Clone ID: LIB190-060-Q1-E1-C12
agcacacgcgtccgggttatcgtgtggaagatagcgtcattttattcgatggagagtgtaacttgtgtaacggatctgtaaactttgtcctcgaccacgaccgacaaggcatattcaagtttgcagcgttacaaagtcctgttggattggcactgttgaaaaagtatcgcggacccacagacctttcgtcgctggttctcattgaaaaaggtcgaatgcttctgaaatccgatgccgtactacgaattgcagagttgttggacaatcagacccttcgtattttggcagttgcaaccagagtgggttttccgaggtggttgagagattgggtatatacagaaattatatccaaatatcgacgtcaaatatttggagagaccgatgtttgtcgtctg

SEQ ID NO: 3071 - DNA, 371 bp, Cyanidium caldarium
  Clone ID: LIB190-060-Q1-E1-C6
agaggaaccttgtttgggagatttccagatgatatttatgatggctatactagtaacgttccaggaaatccgtggattctatgtactttaggaatggcgcaatattattatgagttggcagcagagtggttgaaacatgaaaagattgtcataggaaagtggagcaaagactttttcagacatttgagggttatgcctcctcctcctcctcctcctcctcaatcttctatatcaacgaccattactggaaaagctatttgtagttatgtttctgcgctattagaagaaggagatcgcgtattgaatgctattcgaaagcatacagttcctagtggtatgtttacagaggagattgatcgatatactggttt

SEQ ID NO: 3072 - DNA, 361 bp, Cyanidium caldarium
  Clone ID: LIB190-060-Q1-E1-C7
gagccattgggcgcacaacactttggtgcagtgttgccagtgtcagtagaagaaacataacaagtccaaactttttggactctactttgatttctatctagactggcaatgtaaatagaactgagagtgtcaagttacccctttttgtcggtagagagtaacaatggggttgcgttacgaagacggcttgtctacgcagtcgtcgacacaagaaaaaaagacagaccaggtcagaagaccgaatgtgactcgataaagagtaaacaagcgtagttcttgtaacggagcaaccgctgattcctcttctacatagccagctggttgtgtcaacgtctcctgcgtaggttggctacggtataac

SEQ ID NO: 3073 - DNA, 147 bp, Cyanidium caldarium
  Clone ID: LIB190-060-Q1-E1-C8
gaaagttttctacaatatcgatttcgtttggtaaacatgtggtttccttccacagcactcgcatgtgaagatagatatatgctgactagggttcgagcatttgcatattagatgaagtcctgagcattgggatgtaagctatacgtt

SEQ ID NO: 3074 - DNA, 159 bp, Cyanidium caldarium
  Clone ID: LIB190-060-Q1-E1-D2
cccacacgtccgagaaggtgttgcacggctgtcgaaagaacgtgctgtgaagtgagagaacgtacgagaaagccaagtgaggaaaagaaggcaagtagagggcggcccgagaaaggagaaggcgtaagacgtgatacagagtaggaagaacagagaaga

SEQ ID NO: 3075 - DNA, 253 bp, Cyanidium caldarium
  Clone ID: LIB190-060-Q1-E1-D6
gcaagaagagaagagagctagaaaggaggtaaaagaagagtaaaaggactagaagaggtacggaattcacgaggaaggagcgagaggaaagaggtgtatgatgcaagcaaagaagtgacgcagtagatcagagagtaacacatgcaagtacgtaaagcgaaccggtgaataaagaggtgtgaaagagtggaagaacatgaaagcacagaagaatgtaagaaatggttagagtaaaaaccataaaggaagtaaa

SEQ ID NO: 3076 - DNA, 387 bp, Cyanidium caldarium
  unsure at all n locations
  Clone ID: LIB190-060-Q1-E1-D7
agcccacgcgtccggtggcttagaagaggtcaaggtggaactgcaagaaaccgtacaatatcctgtagagcatccagagaagtttgaaaagtttggtatgcagccttcaaaaggtgtcttgttctacggacctccaggatgtggaaagactttacttgccaaagcaattgcgaacgaatgtcaagccaatttcatttctatcaaaggacctgaactgttgaccatgtggtttggtgagtcagagcacaacgttcgtgaagttttcgacaaggcacgacaagctgcgccatgtattctcgtcttcgatgagttggactctattgcgagatctcgangatcttctgcangagatgccggtggtgcaggcgacagagttatcaatcaaat

SEQ ID NO: 3077 - DNA, 421 bp, Cyanidium caldarium
  unsure at all n locations
  Clone ID: LIB190-060-Q1-E1-D8
agcgagttgaaagagactagtgaagctggtatcttttacttgaaatctttattggatatttgtgcacagactgaagaaaacgtcctttcaaaagatgatctttgttcgttgaaggaggcttctcgtaactttattgaatcgaaacaaaaagctcgtttacatagtgaagctaatagaaactgtcataaagtggctgtaactggaagctggagaagagaagaggctccatcgaaccacagtgtgttcgatacagcttacgaaagtatagtcagtaatctacgagatgaagctagcgccgaccaaagtgaagaattcaagaggcttttaaagtccatagagacatttgaagaaggagaagtagtttcctcagttcttgcaaccgatgagaaacagtttatnttgcccctttcacaaaagctac

SEQ ID NO: 3078 - DNA, 394 bp, Cyanidium caldarium
  Clone ID: LIB190-060-Q1-E1-D9
agcacacgcgtccggaaagaggtcgaaccagtcgtgaaacacttggagctgtccgtggaaactttcggaagcaatacacgtcgtttggcctcttgctttttctccattctgaggagactatacaaggtctcctctcaagttgcagattccttttggcagtcgccacatcaccaaactacttccccttcttcttcatctgcacatggggaacagtcgtggagttctataagttcttctgtacaggatatgccgatatctagaaggtttataggatatatgttgcaagtaacgactctgtttatggccttgctcattagttgtttccgtatagttggctattttctggggaatatgaaaacagaaacgatatacgttttcaacagagtgagtgctc

SEQ ID NO: 3079 - DNA, 206 bp, Cyanidium caldarium
  Clone ID: LIB190-060-Q1-E1-E10
tcccggctgcccccacgcgtacgaatttaagaattcattccagaaaacttaacttgggaagtgaaattgactacgaagcagtaatcaatcctgcaaaaaggtttaatggaacaaaattgccaaataattggacaaaggcgggtttgtttgcccctcctggaaatagagacaaagtgagacatgaagacattatgaacgcgaattcc

SEQ ID NO: 3080 - DNA, 380 bp, Cyanidium caldarium
  Clone ID: LIB190-060-Q1-E1-E11
agaatgtgcggcctgccaaatagtagagaagaaatcgatgaaagtgaaagcgagtaaaagatgaggtatagagaatggcggtcctaactgtaaggatccaaaggtagcgaagtaaatagacgtttgaaaggcgtccagtatgaaaggagaaacgagtgtagcactgtctagtcgtccaactcagcgaaacagcaataactgtgaaaatgcagtaaactagcagtaggacggaaagaacccataattcttgactagataggtttagagaggaaagaggtgtatgatgcaagcaaagaagtgacgcagtagatcagagagtaacacatgcaagtaggtaaagcgaacgggtgagtaaagaggtgtgaaagagtggaagaaca

SEQ ID NO: 3081 - DNA, 390 bp, Cyanidium caldarium
  unsure at all n locations
  Clone ID: LIB190-060-Q1-E1-E12
acggacctaactgtagttcgggtaactgtctttcgtcagtctttacgtgaacaaagcccctctttttgtagaaactaaggctttacgtcataaaacccatacattagtgttcttgtggcacacttgtccagatttgttgaataataaccaaactttgtcgcggtcggcagaaaatgaccaaggcggcagcttccaccagtgtaaagcaactggttccaaaaaactcggacgataagaatcgaccgaataaagtgccttctaatcaaataaggtctcgttcaactataaaccgtctaagactttatcggaaaaaagcatatcaatataataagcatggaaaacgtgtatcaggagcangagattatactagtaacatcccacagcctggtg

SEQ ID NO: 3082 - DNA, 352 bp, Cyanidium caldarium
  unsure at all n locations
  Clone ID: LIB190-060-Q1-E1-E5
agcggacgcgtgggcggacgcgtgggcggacgcgtggggtgactacagaaaagaaagcaatgtgcagcgcttctcaatcacttgaatggtggcaattggtaaaggaaaatgtagacccttgcacaccaacagataaaccaaggacaagttctaaaaaggacaagacaacgcttcctaggcgaactccattgtcggatattacagagttggtggtaggttccaacaagaaataccaagataatacgcaacaacaaccacaaccacctacaagtttttaccgaccattgccaccanaatacaaagagaaacgactcttgtctcttcgataagaccatggatgaaaatgtgaata

SEQ ID NO: 3083 - DNA, 396 bp, Cyanidium caldarium
  Clone ID: LIB190-060-Q1-E1-E7
gtggttggtggtggatgggaatgttaggaagcctctggtcatgggcaactctatcggctctacctactcggatgacatcaacttgcgaagaagaagaagcagttcaggacagtctatagccaccactagggaatccttttcccgtaccagcaacagttctagaggcagcgcgttggttgacccaagaacaatggttccacgaagacaaagaagaaggattactgctcgaagaaatgacgcagtactcttgtctcttagtcgacttatagtggaaactgggaggcgcgcggattgggtagatgtgagcgagtcgtgggatgaaaagaaagtggaaaccttggtggacgccatgcttttggcgccaagacagcaggggcttgacgaaacttgtggaga

SEQ ID NO: 3084 - DNA, 275 bp, Cyanidium caldarium
  Clone ID: LIB190-060-Q1-E1-E8
gttttcttggtagcagttgtacattcaacatcatcaaatgccaaagggaggaaagaaagattcttcaaagaaagaagccacaagtaaacctgcagcagcagatgctacaaagacgacagaaaagtctggtccggaagccaagttgaagggaactggtgcaaagaaacaataaaaagttgactatgcatgtgcagtcctgttatgttttgtgagttctgtttgatagtttccagctattcttttggtagtgaataaagagaaaattttttatattt

SEQ ID NO: 3085 - DNA, 371 bp, Cyanidium caldarium
  Clone ID: LIB190-060-Q1-E1-F10
acgcgtcagcaaacgttatcttactccagtgattgggtggtttatggttattcttattttgaatgcaatgtttttaggttcattggctccactgaatagctgtgcacgactcatatttgcttttgcaagagagggtcttatatttccaaagatattcgcgacggtggatatgaaacaaaatcctatagtatccaccgctgtagttgcttttcttgctgccatcgtgtctctcattgcaggtttggcgatgggaacatataatggctttgttatgttggtaacaacatcatcgctttctctttatgtgggtcatattattgccaatcttactttgggtattttctatcatcgtcaaaagcagctcaactgga

SEQ ID NO: 3086 - DNA, 418 bp, Cyanidium caldarium
  Clone ID: LIB190-060-Q1-E1-F2
agcccacacgtccgcccacgcgtccgcccacgcgtccgatcgatttgtacgacgactccagcgccagccaaggcaacccacaacttgtcttgtgtatcgcaacacattccatcaaaaacaaagaattcattacttgtctttttatccaatccaacaactttccgctctctttccttgtctatttctcctgtatgaatatcataaggatagcaaagaatctcatactttccagaatcgatgtagaaaagatgttgcgaatcactcaaccaagtaagaccattgctacaacatattcccgaaaatatttgtcgcgatgttatcttacccaaagatttcctcttggtgcttacgcgtttcccagtgtcatccttgcggtgtccttgagaactcctgaaggaataaaactttcctgtgcttc

SEQ ID NO: 3087 - DNA, 357 bp, Cyanidium caldarium
  unsure at all n locations
  Clone ID: LIB190-060-Q1-E1-F4
aagtattgcaagctgtcgaaagaacgtgctgtgaagtgagagaacgtacgagaaagccaagtgaggaaaagaaggcaagtagagggcggcccgagaaaggagagggcgtaagacgtgatacagagtaggaagaaaagagaagagagctagaaaggaggtaaaagaagagtaaaaggactagaagaggtacggaattcacgaggaaggagcgtgaangaaggaggaatcccaagtaatcgaggaagaaaaagcttcggtgaaagcgtgaacggattttgtacacactgcccgtcaagttctggaactgtgctaggaataagcangagaagtagaagagagtacgaaaagaagaaagga

SEQ ID NO: 3088 - DNA, 403 bp, Cyanidium caldarium
  Clone ID: LIB190-060-Q1-E1-F5
agcgattccaagacggcgcagtaatcttgttctccacggtagctcgcctcgacagaaaaagacatgttgagctggctacaaaaaaaccacttgctagttgcaatattacaagtgtcaagaatgtttactctttatcgagtcacagtgcgtcttttcccctaatcttcctttttcggtgtcgacgagtgcgtagacatgtcgtcttggtaacgcaaccctctattgacactctaggtttcctgtgcagcgtcgaactacctaaaacgcaaagcagcaaagtcccaaagtttcgactctttttgtttctcccactagccatattgaaccaaagtgttttgcaccacttgccacgacaacgaatggttcactctcgtgtgttttctcttgacaaaactcgaagact

SEQ ID NO: 3089 - DNA, 309 bp, Cyanidium caldarium
  Clone ID: LIB190-060-Q1-E1-F6
agatctctccttctcacccaactagtagaagaatatgttggcgtttacttgtctcccagactgtcgttggttagagacttctcgattctccagatgtgccaaagccaagaccgtctcgttgcgacgtagttcccagtgttcacactcttggaagagtgtttcgatgaactacagtccctattcgataactaccgacaagtcagaaggacatattgtccccggtactttttcaagatttgagtttcctgaagggccaatcaacggtccaaacgtcctgaaccctaacatacctgaccttacagtgtccaa

SEQ ID NO: 3090 - DNA, 356 bp, Cyanidium caldarium
  Clone ID: LIB190-060-Q1-E1-F7
cccacgcgtccggtttttggtttactgaagatgcaaaataacaaagacgatttttccttagcaggctttctttccacaccaaaagttgcagcagaagattggtcagacacgtatatgggggactttacgagagagggcgtcaaggacagcttccgacacctatttttgccaaacaactctccaggccttgacccgtttttgacgaaagaaaactcagtatttggctcacctacagaacctcagttagtgcctgagtggtttccttttcaggacagttcttcggagaccaacgtaaattgggtcaatttgaacagctcccgtgttcaaagtaacgatacgacttgttccgtttcaag

SEQ ID NO: 3091 - DNA, 342 bp, Cyanidium caldarium
  Clone ID: LIB190-060-Q1-E1-G1
agcccacgcgtccggagaatgcttgcggaggaagacaaatctgcgtatgaagctcgcttttcacaatatatcaaagctggggtcggacctgatgacttggaggagatgtataaacaagcacacgagcgtattcgagcagatccttcctttgagaagaaaccaaagcgtgaagtaacgaagcatcgagcttttcgtcagagaaaactcactaaagaacgtgctgtgaagtgagagaacgtacgagaaagccaagtgaggaaaagaaggcaagtagagggcggcccgagaaaggagagggcgtaagacgtgatacagagtacgaagaaaagagaagagagctag

SEQ ID NO: 3092 - DNA, 354 bp, Cyanidium caldarium
  Clone ID: LIB190-060-Q1-E1-G5
aggtgaatgcagggattcctatgaaggatttgatcatttcatgttcatctggatacatggagaataccacagtgatggacttgaataatgtatacacactggtgaggggtcctcaacttacgttggccatctaagcacattctggaacactggcattggctcattgggaatcgaaagctgcttttgaaagttttgagcacttaattgcagttgctaaagagggatgtctacatatattggatgtcatccattccaatagtgagcaataatctattgcgactgattgcttctcgcgatactatttcaataaagtgatcctactcttaatcatcatcatcatgactatcctgtgat

SEQ ID NO: 3093 - DNA, 350 bp, Cyanidium caldarium
  Clone ID: LIB190-060-Q1-E1-G7
cgccaatctcgactgtatagcagaagaggctttcctttaagtggtatgtccgttgtagagtccttatcggactgaggaaggaatagcgtttgggcacatataaagggttttcgcaagtgttagcttggaagtagatttgtaaactggcaaacggaatgattcaccactttcttataacctcttcaagtggtttggttttgtattccacagagtttacgactactcttgcacaaccacgcttagttggttcactgctaacagcacttgtggaattttcaaagaaaaatgtctctctgcctgtttcatatattgaacttgagaaagtcgccgtggcggtttctgtcagtgag

SEQ ID NO: 3094 - DNA, 360 bp, Cyanidium caldarium
  Clone ID: LIB190-060-Q1-E1-G8
aggacgtcgtcgactcatggcacctaagaagacttcgaaagtagcacctcctcctgaagctctggttaaaaaagaaaaaaaggagaaaaagaaagagaaaaaccctcttttcgaaagcagacccaagaactttggtattggtggagatgtacaaccaaagagagatgtctctcgttttgttcgttatcccagatatgttcgtcttcaaagacaacgaaaggttctcatgtcgagactcaaggtgccacctgcgatccaccagtttacgcataccttggataaaaacgtttccaaacagctattccgcttgttaatgaaatatagaccagagtcgaggttggaaaagagaaagcgcctacg

SEQ ID NO: 3095 - DNA, 382 bp, Cyanidium caldarium
  unsure at all n locations
  Clone ID: LIB190-060-Q1-E1-H1
atcggatactctaacctcgatggtttatcacttcgactcggtatgctgctctggatactcgttgatgaatattgtaaactatttcctgggaattttgtattcaaattctgtgctcgctcatccttgttttcttgaacaggtcgagaacttgtaacggttccataagaaatggaatccaacttgctcatgaaattgtctttccatttctcgctcgtagaattttcagtacttgccaaagaagcctttgtctcggaaactgaatgctcctttcctgatacattttcaaatgaaacctcttccttcttggaagtaatcggtgtttctaatgatgtattcaaagatgtattccatgtcgtagaagactgctttncaacaaaagaca

SEQ ID NO: 3096 - DNA, 206 bp, Cyanidium caldarium
  Clone ID: LIB190-060-Q1-E1-H10
ccacgcgtacgaaagaaatccgaaaggagtagaagaaaagagagagaagaaagaaaagaagagaaaagccgtactgaagaccgacacaggtactcgaggagaaagatattaggtggagtgtcctaggtgacgtggaaggaattgttgttttgattttgtttgtgtgtattcaatgtataagcaagcaataaatagttttttcctac

SEQ ID NO: 3097 - DNA, 325 bp, Cyanidium caldarium
  Clone ID: LIB190-060-Q1-E1-H3
cgcgtcagctcaaacgtccggttgggccttctggtggagatgccctggattgagctacgtagtggcaactccgctgtcttgagagacataactgcaagtactgaaaaccctgacataaaggggagaacgacgacgaatctcagtacctgtctgaattctgcacaaggaaatgttacggttgacttgtccctgcagtgtaccttgacggataaattttcattgaagcttctcgacaatcactttaaattggcgtgttttactgataccttgtttttagttttaccatgcttatcctttgttattactggtaatcgtatagtctgta

SEQ ID NO: 3098 - DNA, 377 bp, Cyanidium caldarium
  unsure at all n locations
  Clone ID: LIB190-060-Q1-E1-H4
tcacctgagtttgtatgaaaaatgacggaaagcgacaagtcagtgcttgttgtcctctcaggtccatctggagctgggaaaagtagtatcatacaaaagctgaacaaagattaccctgatcgaataggatttagcgtaagtcacacaacaagaccaccgcgaccggnggaacaaaacggagtagaatactattttgtttccgaggaaaaatttaaaaaaatgatagagaatagtgaatttatagaatatgcgaatgttcatggaaattattacggaacacgttttcaagcagtagagagtgttctcaatagangaaggctgtgtgtgctggacgtagacgttcaaggatgccgttccattcgtcggagaaacatgaa

SEQ ID NO: 3099 - DNA, 404 bp, Cyanidium caldarium
  unsure at all n locations
  Clone ID: LIB190-060-Q1-E1-H5
cccacgcgtccgatcgacgatgacatttctcaccaaaaaagatgtggaacattgtttcgatgtgatatggtttagcatatttgatatccaatattcttgtttatgttctttgaatgccttgaaccagatgtgtcgaacctacagcgtgtctgtgccggctggcgatgactttgaatttccaaactctccttgcttaagtgactgggatctcgttcattttgtttcccatagcaacgaacctgtatttcgtgtatttcacaagtgcatcatgtgctgctttttagaacanagaatagttgtctttcgggatggcctttgtatactgaaaaattccaacagctggttgttgttggatgctttgcgtgatatcacaaaacatgaaaaggacaaagaaaacccgttct

SEQ ID NO: 3100 - DNA, 367 bp, Cyanidium caldarium
  Clone ID: LIB190-060-Q1-E1-H6
aggagaaagtcaaccagatgaaaacagaacgtggctttgctcttacggatatattgcgtgaaatacataaaagaatattgacaaggaatatggcagtccgagcgaagacatatttattggagaaatttgctgaaatagaacatcatcttgcttttggctgttctgaaaaactccagctttgttctttgattggtgcttttcaaatcatgaaggcgttggaagtgttggatgctcaagttggaagttagtattccatgtaagaacattatactagatggacgaaggattcatctatataaatattgcaaaaggacacaaagcaatctctttgtgctcgagaaacatatatatacatacttcctgtgta

SEQ ID NO: 3101 - DNA, 352 bp, Cyanidium caldarium
  Clone ID: LIB190-060-Q1-E1-H7
gacactatctgccatggttggtgagttcatcgcattgtttacatctgcaagatgtccttgttgtcatttttggcgtttgtctgactttccaacattggacactttgcaagacgtgtgctgtcatttaccagcctccttgcgatatagtttacgtcaggtatcataaacaggcataacacctgatattgcgtaccaactccacgtctccccatgaatctggtcccagcgttttagatgcctcagtcacaatagtcatagccatagactcgacgttgctatgtacaaggtcggttttccaaggaacttgagtcatgtgtcccataattagatctcgtcacactcgactcgcttg

SEQ ID NO: 3102 - DNA, 140 bp, Cyanidium caldarium
  Clone ID: LIB190-060-Q1-E1-H8
cgatccacgcgtcagctcacgcgtccgcccacgcgtccgcccacgcgtccgaaataaatagaaaaaattcaatggaaatcatataaagaaaaaaaaaagagggtaaaaaattcaaagggttaaagggtttgatgcagtaa

SEQ ID NO: 3103 - DNA, 129 bp, Cyanidium caldarium
  Clone ID: LIB190-060-Q1-E1-H9
ccacgcgttccggaaataggacagctcaatagcagattggataaggagttaatgatgagtatacagttatgatacttaacggtagtgtatacgaaatatggatgtattaaccgagtatattaaggaaat

SEQ ID NO: 3104 - DNA, 422 bp, Cyanidium caldarium
  unsure at all n locations
  Clone ID: LIB190-061-Q1-E1-A1
aggaaagaatgagtaagaaaaaagggagtcattccaccaggggagtaaaggcgcaagaaagaaacccaaagcaattgacgggaatcggaaaaaggggtggatcacgtggattaggccgataaaccgagaaccttacctctccaagaaggtgttgcacggctgtcgaaagaacgtgctgtgaagtgagagaacgtacgagaaagccaagtgaggaaaagaaggcaagtagagggcggcccgagaaaggagagggcgtaagacgtgatacagagtacgaagaaaagagaagagagctagaaaggaggtaaaagaagagtaaaaggactagaagaggtaccgaattcaccacgaangancgtgaaggaaggaggaatcccaggtaatcgaggaagaaaaagcttcggtgaaagcgtgaacggatt

SEQ ID NO: 3105 - DNA, 338 bp, Cyanidium caldarium
  unsure at all n locations
  Clone ID: LIB190-061-Q1-E1-A10
aatgtccggctcgacccacacgtacgcccacgcgtccgcttccttatattctttgtgcttggacaatggttgcaaagactgctctgagttgcctctttctctctttccttatcgctgccgcagttgcagccgacgtggtttcacatgagagatggggatatgctcagcanacccaacaacagcaacagtgccaacaagtatgtaaacagtatgcatactatcagagtccagtctgcacttccgtaaccacacagagcccatactggaaccaatgctcgaagactgtgcaaaccttttgtcccaagccagtgcagtacttatacccaatctcctacatg

SEQ ID NO: 3106 - DNA, 397 bp, Cyanidium caldarium
  Clone ID: LIB190-061-Q1-E1-A2
acggtcgttgatctccaacaaccgcagccatcatgaaaatacttttattcgactcggttcttcttctccagtaactcagttgcaaataaagaaaagtggaataagaccgtcgtgtggagaacggatggcctcaaacaagttgtggctttcctgaactagacaaggctttaggaggtggtattcccataagctccctgtttatattgttggaagacgaacctaccactatctaccagtaagtattgcccttctgctgcaatgtattccaataaaatatatcaagatctagtttagatgtaaaaatgaaaaagaacagtaagaagagaaatacaggtcacgaattcatgacgaaagcaccttgaaggaaggaagaatcccaacttgcccaggaataaaa

SEQ ID NO: 3107 - DNA, 428 bp, Cyanidium caldarium
  Clone ID: LIB190-061-Q1-E1-A3
atccaggcgtcagggggtcggaagagaaggcagaacgtcaggaccggaaacgcttgcttaatagagtttcggcgaagagagttaaagaacgtttggaagaagagtgcagaaatttgggagacgggggttcaagagacgagaatctccttaaagacctggaggaggagaaaaagtcactgttgccgtacattcagagactcgaggaagacttgcggtgcctaggagagggagctttttctttgttgagagatgaagcacattagaaacacgtagaggtgggagagttggaattgttcgggttccatgtaatccgtaagagcgttctggaaaaggtgtcttctgaagaatagatacctacgaaacctgtataggtcgtccacaacggaacttcgggttcaaaagaataaatagtatttttattgtaaaaa

SEQ ID NO: 3108 - DNA, 421 bp, Cyanidium caldarium
  Clone ID: LIB190-061-Q1-E1-A5
ttcccggctcaacgcacgcctcagcccacgcgtccggcacaacagtagcaactattcgaaaacaacagtatgttcagaagaagaatatgtagatatattgaacaaagttatcgtcgatagcgactggggtgaccttccaaaattgagaaggaaactagcttcgttggaggaaagggaacaaccaacaaccacgccaagggagacaagaggacaaacaggtgactggctcactcaaagcgtgccatcgacatggagtactccacaaagtgtgaatagtaactatagaacagtggatgacaaaacggaaaaagtatctaaagggaacaaccggcctttggaaaatttttttcggaaatattacaccgaaaaacaactattcctttgaggtgttggtaagacaggaagaaaaagataagagaag

SEQ ID NO: 3109 - DNA, 416 bp, Cyanidium caldarium
  Clone ID: LIB190-061-Q1-E1-A7
cccacgcgtacgcggacgcgtgggcttatattctttgtgcttggacaatggttgcaaagactgctctgagttgcctctttctctctttccttatcgctgccgcagttgcagccgaggtagttgtcagaggagagatggggatatgctcagcaaacccaacaacagcaacagtgccaacaagtatgtaaacagtatgcatactatcagagtccagtctgcacttccgtaaccacacagagcccatactggacccaatgctcgaagactgtgcaaacctttgtcccaagccagtgcagtacttatacccaatctcctacatggacctattgcagcacctacaccaccactagcgtaccatctcaatgcagcaaaggcggttactacttatactcaaacctgctgtgcttatgcccaac

SEQ ID NO: 3110 - DNA, 405 bp, Cyanidium caldarium
  Clone ID: LIB190-061-Q1-E1-A9
cggctcgacccacacgtacgaaatgactctgtatggtctacttctacagcttctcaagctctgagtgctcttccaaccagtgcaccaactggagcctcatctagtagcagtagtagtgcagtatggttccggagacgtgtcattcttggtgcaacattcaatcagtcgatatccctttcatcgctttccactggatcccataattttacatcattagtatgattgaatttgaccatcaccaagaattcgtcaggtacatttgtaggtcctttccgagtggtaaaacctgatgtcgctgttggctcatcctttatcgatgtgattgatggagttcttgttccaccaccaccaacttccgccacaagtgctccaactgctgtaacttctgctcccatcactacagtt

SEQ ID NO: 3111 - DNA, 424 bp, Cyanidium caldarium
  Clone ID: LIB190-061-Q1-E1-B1
tccaggcgtcaggcttgaggtgtggcttggtttttagctgcgtggtaacttgtgtagctctttaggtaacaataatgcagatattcgtaaagactcttactgggaagaccattacgcttgaggtggagccctcagatactattgagaatgtcaagtcgaagatacaagacaaggaaggtattcccccagaccagcaacgtttgatttttgcaggtaaacagttggaagatggtcgcactctctcagactacaacattcaaaaggagtctactctccacttggtcttacgtctgaggggtggaatgcaaatattcgtgaagactcttactgggaagaccattactcttgaagtggagccctcagacactaatgaaaatgtcaagtccaagatacaggacaaggaaggtattcccccagaccaaca

SEQ ID NO: 3112 - DNA, 413 bp, Cyanidium caldarium
  Clone ID: LIB190-061-Q1-E1-B2
ggagggcaccgatttgtgtctccacacttacctgtttattgttgctttattttgatcctttcactgaagaagacttcactttacgtcaatgtctttctgtttttttccctgggttcgcagtttcttttctcgacaacgttttggttatagagaagtgtttctttagtgtcatcaacactattttggatgcacctccttccaagtcgcttagtgaggcttctgtcgttcaagttgcagagtatcttctctacttgacaaacgcttctatttcctatcatagaaataaagagtccagcgatgtttatgaacaggtggttcatgttcatgagagaatttgttgccgtcttcctcatgctattatagacgatccggatggaaaaaagtcgcgagagttttaaagattctgaacttcc

SEQ ID NO: 3113 - DNA, 423 bp, Cyanidium caldarium
  Clone ID: LIB190-061-Q1-E1-B3
caggcgtaagcgtttattagaagacttgcctcctccaaaactggcacttaatggcgctggcggtccaacagcaactgaacttgcacgtttgcttggaaagggtggcactatggtggcttaggcaaatgcgtccgggaaaccatttagtattcctactactctatttacaacacaagatatttcactgaaaggattctcgatgcttaattggttaaagtccaagtcagagcaagatgtgaagaaaatgttgcaaagtgtcacacaaatgatggaaaatgaccagttgaagttttggatcgaaaggaaaaagttggaacaactcgaaacaacattagaagcgttaaccacaaaagaaaccttcacaggaaagatcactatttttagttaccaaaaagggagagatgtacttgagtggtcgttgaa

SEQ ID NO: 3114 - DNA, 416 bp, Cyanidium caldarium
  Clone ID: LIB190-061-Q1-E1-C1
tcagggccaaaaagttgggagtgaaaataattgcaaggattctaggctttggtgatgctgagcgtcccccagaggagtttactgttgcaccatcgttagcgattcccaaggctttgagacatggcggcaatatcgatatagaagatgtggatttgttcgagatcaacgaggctttttctgtggttgccttggcaaatatgaagatattgggtttggatccatccaaagtgaatgtgtttggaggtgcagtagcattaggtcatccacttggctgcagtggtgctcgaatagttgtaactttattaaatgcactaaaacatcgccaaggaaagatcggagtttccgccatttgtaaccgaaggcggtggtccgtctgctttggtttttcaaacggaataaatttttttatttttgct

SEQ ID NO: 3115 - DNA, 330 bp, Cyanidium caldarium
  Clone ID: LIB190-061-Q1-E1-C10
aatcccgtctcgacccacgcgtacgcccacgcgtccgcccacgcgtccgcccacgcgtccgcaataaaggcataaactccattttttctaaaaaaaaaaaaaaaaaaaaaaaaaaaaaaaaaaaaaaaaaagaaaaagggaaaaaaaaaaaaaaaaaaaaagaaaaagaataaaataaaaaaagaaaataaaaataaataaaaatatatggggtggtcgagtctataggtttaaattttagttagtcttctatactagtttatgggtgtacaaattgttaccttgatttaaattaactggccgtcgttttaaaacttttgaaatggaaaa

SEQ ID NO: 3116 - DNA, 422 bp, Cyanidium caldarium
  unsure at all n locations
  Clone ID: LIB190-061-Q1-E1-C2
agcaattacgattgtggatgcgcaatgattgtttccgtggcaactcctgaagtgacaactactccttctactctagagaaaagacgaaatagtgactcgttattaccttcacaggcggaaagtttaaaagatggtttcaaacaagtggaagaacaacacagacgagatttaaaaaagctcgaaaggcggtataaaagcgctgtgaaacagctgcaactgaagcacagggtatgcaaagtgttgaaagcaaagaatacaggtggtgtaagtaaggaagaggagaagtgacccataaagtcatgagggagattgtgggagtgggaatgttgcctcttcgtcctttctttctgaggttcagangaatgtgatgggagaagttaacatcattatagagaatatttgtatataggaactacgataca

SEQ ID NO: 3117 - DNA, 362 bp, Cyanidium caldarium
  Clone ID: LIB190-061-Q1-E1-C3
gaattccctactcgacccaggcgtacgggcaaataagggaaagcagtaaaagaagaaagagaaaggaaaaaactgagtatcaggaagaaaagacggagtagatgaggaaagaaagatcaaggaagtaagagtaggagagggagtaatgtgaatgaaagcaggaaagtatttgaagaagagagtgtaaagcgcgtaccttttgcataatgtcccagcgagtgaaagaggaagcacaaagaaagaaaaagaagtagccaggtaagacccgaagctagttgatcctatgctgtccaagcgaagtaaggctgaaccagtatctgtggaaaaagatttggaagagatggcataaagggttaaaagcc

SEQ ID NO: 3118 - DNA, 409 bp, Cyanidium caldarium
  Clone ID: LIB190-061-Q1-E1-D1
ctgttctgatggtttaatatctgtagaccttgccaaggaccttttgactgcacataagaactcggttgctgttattgtctcaacagagaatataacgcagaactggtatagtggacatgagcgttctatgttggttaccaatacgttgtttcgtatgggtggtgctgcaatattactaagtaatcgttcgaaggatagaaaacttggaaagtatcgtttaaatcatacggttcgaactcatttcggagccgatgacaatgcttaccgtagcatatatcaagaagaagatagtgaaggagtgaaaggtgttcgactgtccaagtccattatgtatattgctggtcaagctctgaaacacaacataactactttgggacctcttgttttgcctatttccgaacatattcga

SEQ ID NO: 3119 - DNA, 331 bp, Cyanidium caldarium
  Clone ID: LIB190-061-Q1-E1-D10
acggcaacgcaattccgagaaagagaaattgttgaggcacacgagtgtcgttgctagtgctataggatggtagtttatcgaaagggactagtaaatatgttacaaaagtctttaggagagtttaaagatgctgttcgtcaggagaaaatcaaagaggacttttccaaaagcgaatatcacgttacaaagggagagaagattcgtgccaatagacttcaagcacaatatgcaagaaaggcaacgaagacttggaatatgatcaatacgctgttggaaagacagtcgagaggattctaattggatatttgtatgtggaggagcttaaggaaaa

SEQ ID NO: 3120 - DNA, 366 bp, Cyanidium caldarium
  Clone ID: LIB190-061-Q1-E1-D2
aattccaaggtcgatttgacatacccaagagagagagagtagcagcatgagtgaggaagaagaaccttgtgacaatgagaatatattagcttcattgtatcaacagttgaaaactttacaattcccagctgtacttggggcactagagacaacaccacgtggaaaacacgttgcacaagccactataccagagtcgtcgtcgtcagtgaccacccaagaaaatatgacgcccaagttgcaagcaatagctattgcactgaaaaaccaacttgtgcgcactacagaacaaatggaatattggaaacaaatgtatgaaacttgtgaagaacaacgtagagaatggaaagcacaatgggaagaaaaact

SEQ ID NO: 3121 - DNA, 421 bp, Cyanidium caldarium
  Clone ID: LIB190-061-Q1-E1-E1
agggatcatgtaaattaatccgatttaaaccgagaaccttacctctccaagaaggtgttgcacggctgtcgaaagaacgtgctgtgaagtgagagaacgtacgagaaagccaggtgaggaagagaaggcaagtagagggcggcccgagaaaggagagggcgtaagacgtgatacagagtaggaagaaaagagaagagagctagaaaggaggtaaaagaagagtaaaaggactagaagaggtacggaattcacgaggaaggagcgtgaaggaaggaggaatcccaagtaatcgaggaagaaaaagcttcggtgaaagcgtgaacggattttgtacacactgccccgtcaagtcctggaagtgtgctaagaataagcagcagcggtaaaacgtgtgtagcaagcgtagagcagaagaactggg

SEQ ID NO: 3122 - DNA, 419 bp, Cyanidium caldarium
  Clone ID: LIB190-061-Q1-E1-E2
agcgcacgcatccggatttgtatgaaaacagttgtgtagtgtactaaaactaagtatttcctgtacttattcttaactttccaaagcacagtggatctttggtagcaatcaaggtcaatagtctgctaaatttcaaagttgctttcctgaagcggcatatcactctataccagtatttcgatggttattggatcgtcttttgtccgttaacttgaatttctgtggagttgcttgttgcttgaatgataatccaacattgcctccaagcgaatgaaatcctttgtgtatcgtccgggaacattccgcattgcgtgtgctttaacgaacctcgattcagcaaatacttctcggtccgttcaaggacatgacatctgtcacgtattaatcacataatgtcatatacttgtcctgtttactca

SEQ ID NO: 3123 - DNA, 308 bp, Cyanidium caldarium
  Clone ID: LIB190-061-Q1-E1-E3
gaattccctactcgacccgctcgtcagcccacgcaaccgcgcatgttttagtgttggatcggaagctgttttcgatactgtaaacaactctctttcgaagtggaatggcgcgctgaattatgtggatggaagacgcagggaaatcggactaagtgttttggaaaagggccagatgggaaagtgcacgtactcccatcaagtttctcccaactttgcagttgctgctgaccttcgtttgagtcgatctggatattagcgtctaggcggcatgggtaccaaactacctgattgatgagtccataatcctc

SEQ ID NO: 3124 - DNA, 321 bp, Cyanidium caldarium
  Clone ID: LIB190-061-Q1-E1-F1
agcggacacatgggctgacgcgtgggtgaattcctacgagtgtgtacagagaagaagcagtacttccttgttctatgacaactgtctcttggcatgctgcacattgaaatacggcgaagcgggtttatgtcttgaagtaccaactaatacattggaatttttgcaagttgttcatcttgaatccactatgacgcaacccactaggaaagatagacgatgaatcttctaaataaattaaaagcaactttttgttttcaaaacataaaagaatagcataacccaactaataaaagaatgaaaaaacttacgtaaaaacgtgaa

SEQ ID NO: 3125 - DNA, 422 bp, Cyanidium caldarium
  Clone ID: LIB190-061-Q1-E1-F2
aggtcatttactcaacgttgaacaaaaaatagaaatatattctcagatgacgttggaatcatggcttggaaagtgagaacagtctctgaatatcacctgtgcagcctgaaagtggatgtgggtagaacaccatgaatgagaaggcaggttccggaaggaatgttgacttaagctagttgtgagtgaaataggaaagctacaggagtatcggcagcagtattttcatgccattttcctaaaggtttctctgcaatacttctaaaacagcaaattgagcgcgtacgatcttctgcatgaatggcaatgcgactcgggtggaaaggattggaatgaagcccataagagtgagcgcaagaaacattatttcaattttttcgagtcatgcacaaaaatgatccatttgtatttctccctgaaaatta

SEQ ID NO: 3126 - DNA, 421 bp, Cyanidium caldarium
  Clone ID: LIB190-061-Q1-E1-G2
aggtcgagaattgcctcgtcgaatgagagctctttgcgtggttggtttcttatcgtcggcagagtctggttatctgcactataataaatcgcgtgtgccctttaaaagccagtgttcacgagatttctctaaatactgtattaagggcagaaaaggcccttcaaacgagaagaaaattaagtattagccttttcttgggacttggcttgaaacaaaacacgtgttcagcactccatctggtacaggtgacaaatgccaccttcagtgacctggatatcagcagtgtagcgggaaacgaggaacccgcatatagacaaacttttgaaaatttaaggattggtcaagtatttgaagggaacagtggaaaagttgatgccatacggggcttttgtgaatataggaccgaatctttccggactgc

SEQ ID NO: 3127 - DNA, 391 bp, Cyanidium caldarium
  Clone ID: LIB190-061-Q1-E1-H10
cgacccaaacgaccggtaagaagaagagtaggatcggcaaagaatgtacgaaagaaggaaaagatcatgtaagagaatgaaaagagcaagagtaggaagtgtaacgttgtacaaaggagaaaggaactcaataggatcaataatgaacaggataggagtaatactagtgataataataatgttaataggagaaatatgtagaagagaagaaatacagttaacagtaagagaagagataaagataataatgctgttgggaataataaaccatatagcaatgtggatagtaaagaaatgttgggagtatatgaagtaataggaggaatagcagtaataagtggaataggagtaataatgagtaagaaaggggtagaatcagtagtgtatatga

SEQ ID NO: 3128 - DNA, 422 bp, Cyanidium caldarium
  Clone ID: LIB190-061-Q1-E1-H2
actcagacaaccaatggattttctcttggacgagatgaacatcttgccaagtaacccttgacttacaaaccaaacctgttttgctattgggagaaacttttcgacactgcgtaggaccggggattcctttgtagcgtgtcttccactcggcaagctagtgccttgaatatttcgacaaggcgctgtgcaatattctggttttcatcacgtggcgtgtagtcaagaaatacaagaactgcttcagtacgaccaaatatagaaaagggtatacctagagctgagtaaataccaaaagtttgtgccagtggtgctcggaggaaaataggattcgagggaagatggttcaaccaaagaggcgtgttgttcacgtagactgttcctggtaaaccgtgactgggatcgaattcatatttctgactaga

SEQ ID NO: 3129 - DNA, 418 bp, Cyanidium caldarium
  Clone ID: LIB190-061-Q1-E1-H3
agcccacgcgaccggggtgcgcagagaaaggatggctgcggacgaagacgagtttgttctcaagtgtttagaaatacgtcccgacgccagttgttcttttcgcactaggaataggggaacgggtatttccgaagccaaccaaagtactttatggcctggtttgtcgagaaagaatcgtatgcacaggaaattaaactttacagacctgaaagtggttgaccctgctttcaaaaggggaccaactcttagaatcttaagaaatgttattattttgtcggtttttgatttaagggcgcttgtatttcatgaaaaggtacaaatatttgacccggaaaaccttcaatgttcccaagtttcagagcagcttacaacaagtctgcagtcagctccaaagtctggcagcaattttatttttgaa

SEQ ID NO: 3130 - DNA, 402 bp, Cyanidium caldarium
  Clone ID: LIB190-062-Q1-E1-A3
cacgcgtccagacttagtggcattcaacgaacgatgaagttccagtacgtgagtcttttattggctctcttatgcgtaggttctgctctggctgctgaattggcacctggaattgcggaaaaaccggtagagagaggatatgaggaaccctgctgtaccgaatattgttattgggaagaaatatgtatcacacccacacccacacctacaccaacctactattactattattacgcaagaaatgcataacaggaaaatgtcgatagaagcgtagaaaagagtatctcttccgcagaaaaatctgatgcggttcgagggtatttccccacgtactactattatgagactcctacatattattactattatgagactccatccccaaccccgacaccaacgcct

SEQ ID NO: 3131 - DNA, 399 bp, Cyanidium caldarium
  Clone ID: LIB190-062-Q1-E1-A6
acggacgcgtgggctgcatatctctgatggataatatatatatatagtcgatggaaatgtgatattggaagataggaatccatccaccaagcatcatcttattgcatcgtgtgagaattggaatgatgcaataagagaacagtctgtttatcgagttgggaaacgaatgaaacaaatagcagcagaaaatgaaatatttcaaatggaaacggaagcaaccgttggattatttcatgcgatggagttgcatcttgtggacattatccaagcaactcgacaacaacaacaactaggaggaggaacaagaagtagcaatatatatcgaccatggaccaatagattgactattcgtgacctttttcgtttgacggaatatgctcaagatatattgggagataa

SEQ ID NO: 3132 - DNA, 361 bp, Cyanidium caldarium
  Clone ID: LIB190-062-Q1-E1-B1
cgggccggcccacgcgtccagagatatcgctgtattggtggtgtgtgtgtgccaaaggaagacgggatgattgatccaaattagcactaggtggcaataggcgtcggtggctgtgcattctatgatataatagctgcctatgtgacatttgaaggatactggccaccagaggaatgaaggcgcatgaaacaatttgcggcaaatgcggggaagcagcaacgaggagtttaaactccgtgtgtttgtccataacgaaaaccatcttgcgggttttttgttcatcaacgctgtcaaaaagaaccttctgtgaagtgagagaactttagaggattccaacttaggtaaacatggcaactacatg

SEQ ID NO: 3133 - DNA, 424 bp, Cyanidium caldarium
  Clone ID: LIB190-062-Q1-E1-B10
cggacgcgtggggttgggatgtctcggcattcagtgatccaagtggcacaagagaacgcgggtgacttgttagaaagtcctttttggaatactttaaccaattcactgttttatgtagatatcgatggaaagagaatccatcagtatgaattggaaacagagactcactccagttggaaaacgagtcaaagagttggtttcatctgtcctgtttcctacagtcctcaagtggaaacagttttgggtggtatggaagatggtctttattggatcaagttgtctagcaataataatagtagtaacaatacttgtgtcgaacaacaaatatggagccacgggatggacaccaatatagttcgtttcaacgatggaaagtgcgattcgagtggacgactttttgccggactaatggattatcagtggg

SEQ ID NO: 3134 - DNA, 430 bp, Cyanidium caldarium
  Clone ID: LIB190-062-Q1-E1-B11
cccacgcgtccgaaaacaagttgcctgagtgaaaagtgagaaacttgtgtgtatccgtgacatcaacattgttcaacgtgacagacagatgaaacaaaagtacattatgtagctagttacctatgtgcaatcagcttatgatagcaactttcttagagctttgcacgtttgttaacgaaacaagcaagtagctcaacgttgaacatatcaattttcaaagataaattgggaaacaaacgtgcactaaaaaaccacacatggtttttactctaaagttacaagtaacattcactcctgtctttcaggctggtgtgtcggaagctgaggagctgcaggagctgccatggttggtggataaactacagcactcccagtgtagtatgcaggagtaaaagtttcgtattgagtgaacaaaggattgaaacccccc

SEQ ID NO: 3135 - DNA, 381 bp, Cyanidium caldarium
  Clone ID: LIB190-062-Q1-E1-B12
aatcaggttcgacgaagcagagcaaggatcgcaaaactatcaaagagctgaaagccgaggccttggagactaaaaaaagcggcttgaatacacgctccgaaaccgtggcgcacgacgaagtaacaactctctcctctgcaatatctcaagtgagaattgacggagccaaaagtagtggcaagtgtgctgcagagaaagaaaactgcaacaacgtcattcctggcgacaacaaacagacaaggtcacaagcaatcggaacccgcaatcttcgaagtagaacaattcccaagcccaattaaagtagttgttttatatttcgctgatatgcctttgtttctcaaaacatattgaaagcttttgaatgtgttaaagagactgatt

SEQ ID NO: 3136 - DNA, 367 bp, Cyanidium caldarium
  unsure at all n locations
  Clone ID: LIB190-062-Q1-E1-B2
cggacatttagtgtgtttgttgcgattgaaagagagagagcaaaaagtattggagtgttgtaaaatgtcaagttttctaactcgagcagccttgtcattgcgtggtgcgatacaaacaacacaaaaccagtggaccaacaatggagtagcaaggagactttatcacgaaaaagtagtcgaccattatgaaaacccaaggaatgtaggttctctagataaaaacgacaaatatgtgggcaacgattttcttggttggaagaagatatgttgtctgcaacganggtgttatacaaagctgctacagaaagagtagtgactatggtgggattaaaacaggaaccaaatgccaaagagattctagaaaagt

SEQ ID NO: 3137 - DNA, 392 bp, Cyanidium caldarium
  Clone ID: LIB190-062-Q1-E1-B3
aggttcggtggaaatgagcaacgaaagacctgtttatgacgatatggcatttcttacttatggcgtaggaattagacgccaaagtatcttttatggcaactcacttaccagacaagtttgtacggataaaaagcaagtttttcaaaacgttcttgggaatataagggcaagcaccacagaagttccgaagaaactctcaaaggttgaaaattacaagaaaaactcgagtcacttgaagtttcccctgcagcaggatttggaggatgataacatttttgtgtcggaagagtcggttcaaataatcaaatttcacggttcctatcaacaagacaatagagagcaaaggaagaaaggggaacagaaaaagtaccaatttatgttgcctccaaagt

SEQ ID NO: 3138 - DNA, 426 bp, Cyanidium caldarium
  Clone ID: LIB190-062-Q1-E1-C12
accacgcgtccgagacatcagaaacgggttatattcaacgaaggttaatgaaagcaatggaagatattatggtcaattatgatcatacggttcgagattctggaggtcatgctgtacagtttctttacggagaagatggaatggatggtgctattatagagcgccaaattattcattctatgcgaatgagtgatagagaactggagattgcctatcgattggatcccttcgatgcaaagtttggatttgcaccaaatggtaggcgatatttagatatagatgttttggaggccgttcataatgattctgagcttgccgtcctgttaaatcaggaatttgaagctatcaaagaagatagagatttattgagacattccatatttcctagaacagacgataatcgtgtagcattaccggtgaatattg

SEQ ID NO: 3139 - DNA, 400 bp, Cyanidium caldarium
  Clone ID: LIB190-062-Q1-E1-C3
agaagaggagttatgagagaaaagatggaagtaatagaagtggtaagtggagtaataatgaatcatatgaaagaaggaatggagaatataaggaaggattacatgaaggaggagataataggagaaatgataaggtggatatatatatcgataataagtgtgatagtaatataaaggaggagaaagagaggaaagaggtgtatgatgcaggcaaagaagtgacgcagtagatcagagagtaacacatgcaagtaggtaaagcgaacgggtgagtaaagaggtgtgaaagagtggaagaacatgaaagcacagaagaatgtaagaaatggttagagtaaacagaaaaggaagtaaaaggagggaatgaagggaagttatggcaaaaacacgtgccagcagc

SEQ ID NO: 3140 - DNA, 399 bp, Cyanidium caldarium
  unsure at all n locations
  Clone ID: LIB190-062-Q1-E1-C6
acccacgcgtccgcgactggaatgctcaacttgcacaacaacaggacagaagtgaatgccgtggaggctttgttgtggggaaatatgtgtctctatttcttcaatatattcttggtgttctttatctattgggttggtgaaactggtggttggattcctactgttgcagactatcgcgtattgacttcattggaaaaggaccaactgggaaaggaagctcagttgcatcaggatagtgcctaagaagaagcaatgttggttggttgttgatgtgttggtggtggattgtgtacatatatagagagagtgtgtgtgagagaaaatgctttgtgagtgaccactcctcaaaaggcagtgtgaacaaatcctcacanagcanaagaggaaaataaaagctct

SEQ ID NO: 3141 - DNA, 235 bp, Cyanidium caldarium
  Clone ID: LIB190-062-Q1-E1-C7
agacagaagaaagtgtgacgagtttggagatatctgactatgagtgggaagtattgagtagttttagacctagtaaggcattgcgagaaagacttttgcaaaatatttctcaaaggcgttggagagacgaagcgttacgccttgttcacgactccaaacacttgacgatgttatggagtaacgtagtttgacgcaagtgtttatttaatcataaagtcttttcgacctttcatac

SEQ ID NO: 3142 - DNA, 346 bp, Cyanidium caldarium
  Clone ID: LIB190-062-Q1-E1-C9
acccacgcgtccgcccacgcgtccggcgatttgtagttatgtttctgcgctattagaagaaggagatcgcgtattgaatgctattcgaaagcatacagttcctagtggtatgtttacagaggagattgatcgatatactggtttcgagcaaggagctatcaatttaacttggagttatgatgcctttgttactgcggtttggtcgagggaagatgttcacaagttgttttctaaatattgtgaacctccttctccatcgctacctagtatgccaggacctggtggtttatcttctccataataagaggcacttgtgcactttggatatttttgtggttcacattaa

SEQ ID NO: 3143 - DNA, 411 bp, Cyanidium caldarium
  Clone ID: LIB190-062-Q1-E1-D1
cgcgtccaggtatgaaaaagttgttaaagtatccaagtagaaacaaataggctgggaaaatactactgagttgacagcaactctattttatgtctttttactccaactcttttctttcgtcgctagacacggttgaagagtctagttggggactgaagatagtaagtatatttcagaatccgagctcctagtgtctaatattatatttaggcaaggtctgcttcctcgggtcctttttcgatcgaggaagtgtctggtactggtaaatcactcgtcgggaagcagaagacgggggaatatttaagccaaagtctgaatccggaaagatttagaggagactcaacaagaacaactcgatgctcaaattacgactttgtttgggaagaagccttgggttagggcgccttcctt

SEQ ID NO: 3144 - DNA, 425 bp, Cyanidium caldarium
  Clone ID: LIB190-062-Q1-E1-D10
aggtagaaaaggaaccccaacaatatgactggaaaccctatatcgagttgtgtgaaatgatgaaatcagcgaatctaaaacttcaaactgtacttagttttcatcgttgtggtggaaatgtgggtgatcagtgttatattccattgccaaagtggatatttgcagttgcagaaaacaactctgatatctttttcaaggatagagatggcaatgccgatgacgaatatcttagttggggtatcgatgaagaacccgtcttgatgggaaggacagctgtccaagtataccgcgatttctttgtttcttttcgggaaacttttcgacaatattttggaaatgttattagtcaagtacagataggtctaagtccagctggggaaatgccttatcctagttatcagttggccaaatggacattttgtgga

SEQ ID NO: 3145 - DNA, 179 bp, Cyanidium caldarium
  Clone ID: LIB190-062-Q1-E1-D2
acccacgcgtccgctttcaaatattcttttgcaaaaaaacgaattgccacaattagtcgcaaaccaatatcctatggcggtttataaaaaagagcgcaaggttcggacttgttctccaagtaggggaaaattctgtgttgttttagagacatctattataaaactgtctataccgaccc

SEQ ID NO: 3146 - DNA, 414 bp, Cyanidium caldarium
  Clone ID: LIB190-062-Q1-E1-D6
agggcgtagataagcacggtttgaataactgggaagctattgcagaagatcctgaactgggatttccggcaactctagaaaaacttgctcagaagaaacaaaatgaatctggctctgtcaacgagaaagatttcaagttccccaaagcaaaggtctgtcaaaaacgattcaacttgttactagacctgtttgtatcaagcctggaatcttttgaggattataatgcagtgcaacaatcctcttcctcgttggtgattgacgcgttacagtttaatcgagatatactgaaggaacaacctctggtcatggttggagatcctcgtggagttgtagaaataccagagaactcagaaactggagagttacgtcttccgtttgatgtgggatgtggactagttattctcagtttgggtc

SEQ ID NO: 3147 - DNA, 411 bp, Cyanidium caldarium
  Clone ID: LIB190-062-Q1-E1-D8
agggcatggcgaaaggtagactacaggatcgtcttgagaagcttctgccttataatcagacctggtatttttatataaccaagatagtattttacgtatgcacttttattttctctgtcgtcattgctgctctggtcagtaacgcaaagtttaatatatatgataaatccccaccgaatattcatggagacttttgtgcatacaaggcgtcactagctgagccagctggcgtgactgccatttgcaagtacctcatagcagtaggtgctcttggccttgtgtttgctatagggttcgttgcattctctctatggacccttttggcacatcgagtgattgatttatggtgggtcgaagccttgttgaataccttttggatggtctggtggtttatagcagctggagttgcta

SEQ ID NO: 3148 - DNA, 430 bp, Cyanidium caldarium
  Clone ID: LIB190-062-Q1-E1-D9
cggacgcgtgggcggacgcgtgggcgtagagtcaagtgtagatattcccaggtctctagttactccttcctttgaaatgttgaaaagactctgtttccgctggttagaaccaagccatcgcttctatcgatttataggaactgtctatttacaggatgctgctatcatccctatacctgagctagaaagagacgaagagtttagacaattcaagaaccagattttgttttctaaggacagagatgaaaagacaaaagaaagactcagaataagacaggaagtacttcaagagttagaagaacaagggatgattcgaaggaagaaaccaaagaactcttcatatgaccccaaaaatggaatttatatggagagatacttgacaacagtacgtgaagttgctgaggagtatctgtttggaatagacaacaga

SEQ ID NO: 3149 - DNA, 430 bp, Cyanidium caldarium
  Clone ID: LIB190-062-Q1-E1-E10
atagcgcgataactttgaatataagcttccaaataactcgggaagaatgccatcactcggacaactgtagatatacgacccgtaaatagaaagttatcggtaaatagacgcaaagtaactgaattagcgttttgtacggttggtaactgatcgttgggtataaaacgagagaaaataggtcttcgtaaacgttgatattcctttaccatagaatagactggggaatggacaggtaacgtagtttctgctctctctaataagcgtgaaaaagcttcacgaacatccgaaaagggaacttcggaagcaaatctagtaatggtagctatatgagctacaaatagttgtccttgatcagaaccttgtaacgagttttccaattgccaaagtattctgtccagtgcttgtttccttgcagcttcatcctaagtca

SEQ ID NO: 3150 - DNA, 432 bp, Cyanidium caldarium
  unsure at all n locations
  Clone ID: LIB190-062-Q1-E1-E11
aggaagaagacgtggggaaacgctaggcaagtggccgcctaagtgactgcgcttcttttcaatcctttcaaatattgagcttggaccatcgaaatcctcggtatatttttgaataaaaaacgagaactaatatggaaaaatatcgaagagttgagcgagccaaaagtccgggccagactccgccgaatcaagtacgaataactgcggcgggcaaagtgccagcctatgtggactatgcagtcaagttgcttcaagaggataatggcaccgtggaaatcgtcgggctgggtaatgccatcaataaggctatcactgtagcagaaatattgaagcgaaaagtcnccaagttggagcaagtaacaaatcttagttcggtgactattgaagaccgctgggaaccattggaagaaggcttggaccctattgaaacga

SEQ ID NO: 3151 - DNA, 409 bp, Cyanidium caldarium
  Clone ID: LIB190-062-Q1-E1-E2
cccacgcgtccgagagcggcgaacgacgtcgattgtgcggtggcttgatcggttccttccctaatattcgacaacgagcatggaagaaactgctggtgctagtgcagcttccgcaagtggtgcgcctaagagaagaacttttcgcaagttttcgtaccgcggagtagagttggatcaactattggacttgaacatggaacaactaaaggagttgttcaactgtagaatccgaagaaagttgaatcgcggaatgggtatcaaatacaaaacactgttgaaaaagttgcgaaaggcaaaaaaggaagccccggaacacgagaaacctgaagctgtgaagacccacctccgcgatatgattgttctgccagaaatgattggaagtgtcgtcggagtttacaacgggaaaact

SEQ ID NO: 3152 - DNA, 408 bp, Cyanidium caldarium
  Clone ID: LIB190-062-Q1-E1-E3
agggattttctgatgaaaaggaacgcatttggatgtttcataccacggaacctgaaattcgtcataaaccttacgacgaagaaattccttgtgttagtagagaatacaaggaaatatccaattcatttcatccttccgaagacgattggatatttgccaatgatgcactactttatggtgatttaggagaagaatggccatcgaatagtccatggttggaatggaatcgtccaccacaacaacaacttgattcggtatatccaagaaaagatagtcacaaggaggatattggagaagaagttttttcggtggatagtttatggaatcattttcatgataatgaatggcaactagacttgttatcttcttcggagagtaataatagtaatgattggtttattaagacac

SEQ ID NO: 3153 - DNA, 335 bp, Cyanidium caldarium
  Clone ID: LIB190-062-Q1-E1-E5
tgtcattatagacaattcgccttctgcatatgttctacatgaggagaatgcgattcctattggaacatggtgggatgatccattagatgaagaactcttaaatttgcttcctttcttacaggccttatgtgtcttggctgatgttcgctctattcttagtcttcgtgaaacaaaaggagttttattgcacaatttagtatctagtggaccctatcattcatcatgaggaaaattctatgttagatggcaattgaataattgtttgcttgatcgttgtctctgcttctatctagtagtctttataataaaccatcttacatacagttgagtcccat

SEQ ID NO: 3154 - DNA, 312 bp, Cyanidium caldarium
  Clone ID: LIB190-062-Q1-E1-E6
aggaaaaagcccagaagccaagataaggtatcaaagtaaagaaagaaggaaaaggagaagaagagagggtaggcttagaagcagcaaaccagagaggaaagcgttaaagcatgaaagaaaagaaatccgaaaaagaagagaaaaaggtaagaaagaggaccgaatcagggtaagaggtagaggagcaagaagagaagagagaatgctgggtggagtagcgaaacaagagaagggaagtaaaaggtaagaaagaggaaaggtttacgagagaaggaagtagaaagaagagagtgtaaggcggcgtcataatag

SEQ ID NO: 3155 - DNA, 412 bp, Cyanidium caldarium
  Clone ID: LIB190-062-Q1-E1-E8
aggggatctctcttttttttgtggggagaggtgattggcgactctgtcgaggaagcaaggcttgggaatagaactatatattcacatcattttccatcatctttctagaaattattgaagaagaatagttgtgagaatatgagtcattattgtggtgtggtggtatttggtttccaatcgtgtccttgtcctgctagtctatggagagttggaacaagaagaaaaagattgcgttgcgtttttttatgtgtaaataataggaacaattatgcgagtgccgcttcttcatcctcacacattaggagagagtgtctcatcataggactaggtaatccaggaaccgagttgagcaatactcgtcacaacttgggctttcaagtattggattattatgcaaatagatattctttca

SEQ ID NO: 3156 - DNA, 422 bp, Cyanidium caldarium
  Clone ID: LIB190-062-Q1-E1-F11
aggaaccaccgcgtcattccttgttgtgtatccttggatggtttccacctcatatcgactagttcgtactacaacagtttctttcaagcgtggattatcgcaagcagtgaaaagcgatcaagctacttctgcttcagaagcgcctcaagtttctagtgggggttcctccttacatccccaggaaatacccaaagatgctgtcaagttttcattgaaaccttttgctactcacctcatcgaagctccagaacccgttgcttatgctacgaaagaacagttactggcatatcatcgcacgatgacagttatgaggaggtctgagatcagtgctgatttaatgtataaagcacagttggttcgaggtttttgtcatttgtacgatggccaagaagcaacagctgtaggcattgaatcagcgatta

SEQ ID NO: 3157 - DNA, 432 bp, Cyanidium caldarium
  Clone ID: LIB190-062-Q1-E1-F12
actcgagtggtgggaaaacgttcgacgcgagattgtcgtgagaaacagaaaggaaccttttttcacaaccagtaaatagttacatggatacaacatcgttcatatattatagcaacttttcctgttgtacacgacaccccaactttatttctgtcgctaagcaactaccgaaagcacgaaaactgagaacagtaaagtccaaccagttggtacagctatcctgcgtgttgaaatcgaacccttttttccaaaaactatctctaatgaaaacactagaagacagtttggagaaaatgtggagaaatagcaaggcctcgtcggagaaaaggtcgatggagtacatacagtgttcagcgtgtaaagcagtatatccagtacaggcaaatatgtttggggaaaacgggagatatgtgcgttgtatagtttgtggaa

SEQ ID NO: 3158 - DNA, 400 bp, Cyanidium caldarium
  Clone ID: LIB190-062-Q1-E1-F2
agcaacaacaggacggaagtaaacgcagtggaagccttgctttgggccaacatgtgcttgtactccttcaatatcttcttggcctttttgatatactgggttggtgaaaccggtggctggattcctaccgttgcagactatcgcgtgttgacttctgtggagaaggatcaaactttgtccaaaggagcggagatgcatcaagaagagtctgcataaaggactatttttgtatagttgccatcatggacggtttgtgtggaaagttgtgattgtgtagagagtgtgtttgtgagttgtgtgtggtattgttgttttacgtctttgtgagtgaccactcgtacgagtgtgatgaatcctcacaaagatgatagaagacaataaaacgatgttgttttggtat

SEQ ID NO: 3159 - DNA, 354 bp, Cyanidium caldarium
  Clone ID: LIB190-062-Q1-E1-F3
acaccgttttttgtgggtttcactcgtgtgttttgtcttgttaaaactcgaagactatttatttcttgttatgttttagaggtgtttctagactctttttggagttgtcatactccagtcttcgtggtttatgaatggctctagtggcaaagagtacttttactttcccaccattctccacagctccaaccatcaacttttatacgcaccttgtatatttgtgcccctagtagctaactaattccgcttgaagagattgcaagtttggtgtactaaacaagaggtgcaagtgtcagtataagagagtatgtatgtgtgtgtagtgtgtttttgggagtaggagtacacccaagt

SEQ ID NO: 3160 - DNA, 389 bp, Cyanidium caldarium
  Clone ID: LIB190-062-Q1-E1-F4
aggagtaatttgttgaagagagggccaagatggtgcactctatggaagtaaagaagaataagtttatagaacagtgggctgcctatagagaaaactctgaatatttatacaaatggacaccaaagcgtgtaataggaatcggtcttcttgtgggcgtgattccgtattacttgtatcgctacattgtgtacagtgtggaaaatcagtacccaaactatggagctgcagagtatggtttactgggaggttctcctccaaagtactcgagtcaagatgatgaaaataagtaacttgacaacgtcaccaacgacctaaagttgctctgttggcgtattatatgaaaactttataaacaagtttattttttttctaaaaaaaaaaaaaaagaa

SEQ ID NO: 3161 - DNA, 410 bp, Cyanidium caldarium
  Clone ID: LIB190-062-Q1-E1-F5
atgtttcgttgtggaaaataaaatttttgtgttgaacataaaaaaaaaaaaaaaaaaaaaaaaaaaaaaaaaaaaaaaaaaaaaaaaaaacaaaaattaaaaaaacaaaaaaaaaaaaaaaaaaaaaaaaccaaaaaaaaaaaaacaaaaacaaaaaaaaaaaaaaaaaaaaaaaacaaaaaaaaaaaaagaaaaaaaaaagggggggcccccccaaaggtttccacctcaacttccccttcccggcaacttcaagcccccccaaaggtgcccccaaattccattcccgggcccttctttttaaacgttcgaaccgggaaacccccgggcgttccccacctaacccccttggaagcaaaccccccttccccaagctggcctattccccaagggccccccccctcttcccc

SEQ ID NO: 3162 - DNA, 416 bp, Cyanidium caldarium
  Clone ID: LIB190-062-Q1-E1-F6
agcggacgcgtgggttgggatgccgcagaaaacgatgatgggatacacctctcccgagcaagcgctgttgcagttagcatccatcaagaaaaccaccaaaaagttaaagaagcacttgcaaaaatacttggatgaaacaaacactaagaacacagaagatgcagaaccactggaacgtgcaaaggcaaacctcaatttggcatatatatcggcggcccttttctacatgcttcttcgagttcacggggtggaaacttcaggacatcctatcatggaagaactgcaaagaatcaaggaacgttttcaagtgctccgaaagttaattggacaagaagatactcgttcactggttatagatggtgaggcgacgggtaggattttagcagccactctgaaagatctctcagcggacaaaa

SEQ ID NO: 3163 - DNA, 134 bp, Cyanidium caldarium
  Clone ID: LIB190-062-Q1-E1-F7
aaagggggaggtactcgccccgatggagcattcttaaaagcagtggaaaaagaattcggctcattggacgctctcatttcgagcctctctgctacagctatcggcgtggacggatctggatggggatggctcgt

SEQ ID NO: 3164 - DNA, 429 bp, Cyanidium caldarium
  unsure at all n locations
  Clone ID: LIB190-062-Q1-E1-F9
ccgatattcatcctcgaagtgatgatggttgtggtgagtttaattatcgtatggtttggacgatagcattcccggaagaacgttcttatcgacttcgaatgactatctgggatgtgtcttcatctcctacgggttccgttcgagacggtacttttattgcagaatgtcaagtggacttggagcctttgttaaaggaagctcatctaactggtcgtatggtatcaagaaagcctcaatggctaaggttttctcatcccaactatccacagatgaacgcacatgccaagctgtctctagatgtattggatcaacacgatgccaaattctatccagttgcaaaaggaagacaagaacccaatcaatatccatatttacctccgcctttccgtcncgtattcttaaatcctctgaatcctatgccatttgtgt

SEQ ID NO: 3165 - DNA, 411 bp, Cyanidium caldarium
  unsure at all n locations
  Clone ID: LIB190-062-Q1-E1-G10
atctccttgcgaggaatttcttgcggggccgaagactcgctttcttgttttgtggtggttgtcgctttttgtctctcaagtttttgccgaaaatggttcaacagtggagagcagcaggtctcacttatcttcgttatgcaaatatatgtgcagattttgttcgcaaggcactaaaggaaccgaaaagaactgaagcattgtcgaggaccggttttgagatgacgagaagcgagtggagtgaaggcaaggttgtgaagagaggtaagtccacgaacanaactactagaacggtgatttgatggagacacctgcagagacccttacacaagagaatgaaactagtaacgtcgccaagagtaacaagtgaatgtgtttgttgtaataaacgtctagaagaacgcgtacgtgtca

SEQ ID NO: 3166 - DNA, 403 bp, Cyanidium caldarium
  Clone ID: LIB190-062-Q1-E1-G12
cccacgcgtccgcccacgcgtccgcccacgcgtccgcccacgcgtccgggagaagaagagagggtagacttagaagcagcaaaccagagaggaaagcgttaaagcatgaaagaaaagaaatccgaaaaagaagagaaaaaggtaagaaagaagaccgaatcagggtaagaggtagaagaacaagaagagaagagagaatgctgggtggagttacgaaacaagagaagggaagtaaaaaggtacgaaagagggaaaggttacgacagaacgaagtacacagaacacagtgtaacgcggcgtcataatagaaatccgaaaagagtagaagaaaagagagagaagacagaaaagaagagaaaagccgtactgaagaccgacacaggtactcgaggagaaaggagac

SEQ ID NO: 3167 - DNA, 403 bp, Cyanidium caldarium
  Clone ID: LIB190-062-Q1-E1-G2
acgcgtccacccacgcgtccgggcggacgtttttttcgtgaagcaaacaacaacaacaacaacaactatcggtcgcgcaatgcttacagtgaaaccccatcacaacttgttgaaatgggtatttttcaacatccctgcgagaacgaactagtttgtaagagtaccaacgaaaagatcccgttttttaacgctccaatatttctggaaaacaagacgcagattggcaaagtggaggaaatatttggtcctattacagacgttcactttactgtaaaaccagtggaacgtgtattagccacttcttttggtgtaggagacaaattctacatcggctcagagaaactgctgccgcttgacagatttcttcccaagccacctggtagtcagagcggagacaagccgc

SEQ ID NO: 3168 - DNA, 341 bp, Cyanidium caldarium
  Clone ID: LIB190-062-Q1-E1-G5
acccacgagtcaatggacacattatgtgacgactcggtggtatcgggcagcacaccttatcatgtcctactagacacattactctacagtcatacacatgtcgagtgctggctgtatctttgggggggcgctcactcacggaagaccgctgtctccagtaatgaatggtttccatcagttagacctcatcacgaagacactatgaactccttcagcacacgcatttgccacatgtaacgaactcccggacgtactcactatttgcagtctcttcctagaagagcaccaaaacctctcttcggaaatattcgctgggtgccgatccccgttgctctggcgtt

SEQ ID NO: 3169 - DNA, 405 bp, Cyanidium caldarium
  unsure at all n locations
  Clone ID: LIB190-062-Q1-E1-G7
cccacgcgtccgcttgcttctggatcagagagcgcttccttaccgggcgttgcaattgatgagaaacgagtcgtgtcttccacgggagctttatcccttagtcaagttcctaagaggatgatcgttattggaggtggctatattggtcttgaaatgggttccgtttggaggagacttggttcagaggtcactgttttggaatatcttgatcacatagttcctatgcttgatcgcgaagttgcagatcagctctacaaatctcttcaaaaacaaaatctaaagtttaagctcggcacaaaagttgttggagtggatagcagtggtagcaccctcaagttgacagcagagccatcganaggtggaaaacaagaagtcctcgagtgtgatgttgttcttgttgctaca

SEQ ID NO: 3170 - DNA, 427 bp, Cyanidium caldarium
  unsure at all n locations
  Clone ID: LIB190-062-Q1-E1-G9
aagaacttgtagaagaaaagagagagaagaaagaaaagaagagaaaagccgtactgaagaccgacacaggtactcgaggagaaaggagacccaaattaaggtgagagaatggacgataaggaactaggcaaaaggatatggtatctgcggtagaacatatgaaagaagcagcaccgactgtttagcaaaaacacagcactctgcagaaaagagaaaatgtaaagtatagagtgtgcggcctgccaaatagtagagaagaaatcgatgaaagtganagcgagtaaaagatgaggtatagaaatggcggtcctaactgtaaggattcaaaggtagcgaagtanatagacgtttganaggcgtccagtatgaaaggagaaacgagtgtagcactgtctagtcgtcnaactcagcganacagctataactg

SEQ ID NO: 3171 - DNA, 394 bp, Cyanidium caldarium
  Clone ID: LIB190-062-Q1-E1-H1
ggtgctctgagaagggatgcaatcttttcacttggagagtacgtgtcctcaaaacaagcaggagttagaaacatatttcgagcgtctacaaagacatgcacaacagcttgaggcggagcttgtacgtgttcgacaagctatggcccaagttagtttctatcttcgtgattttcgccaggtggaggaagccaaaagtcgcaatgatttttcaaatgttagcgccgtcacaggagagtctgcggaaaatgggtgtctatcaagaaacacgtcgttctcgtcgtttggctcttctactgcaaggtctgatacaacaccacaaaagagtgtcggcgagaaaaggaggagggttaataagggatcgagtggaagatattggtctagtgaagaacatgat

SEQ ID NO: 3172 - DNA, 302 bp, Cyanidium caldarium
  Clone ID: LIB190-062-Q1-E1-H10
aaactttttccaaatatagagaagttgttgatgcaagggttgttgatgaacgtgaaactggtcattcgcgtggttttggtttcgtatcctatgcataatgttcctccgtagacgaatgcaatgccgcactgaatggcaaggatatgcatagacgcactattcgtgtgaacaaggcaatgtctcgtgaacaactcgagagtggaggagactttcgtcgcggtggtcgtggacgatacggaagttttcgttccggtccttatgagagacgtgaacgtgactctgatcgtaggatagatcatgac

SEQ ID NO: 3173 - DNA, 428 bp, Cyanidium caldarium
  Clone ID: LIB190-062-Q1-E1-H11
atgaattttcaggtgttggaggtgcgtattcccaagagttgggaacagaacagcacttggagacataaacgttgtaatagaagcaacacatataggaatcgctcttttattcataatatgtcagggcttgtttgtcacagagcacttatattaatagatcacggcagtaaagttccagaggcaaacgaccaaattgccaaagttgcttctctagttgcaaagcggcttccaaatacttttgttacttttgctcatatggaattagcgaaacctgatttgatggaggctttcactctatgcgttgaaaataatgctaggaacatcactgtttgtccgtttttcttgtttcctggaaaacattgcactgtagatataccgcagatggctcagaactgtgctagtaagtttagtagagttacttgtaatgt

SEQ ID NO: 3174 - DNA, 383 bp, Cyanidium caldarium
  Clone ID: LIB190-062-Q1-E1-H12
atttgaggtttcttttcgcccgtgcgatgttaagacgggcactctatgaacttgtaacaaggcttatatcccaaagttctaaagtagcaccttttaattttcgctattcggtagagaggaaattgggaactttatttcctagttttcaccatactttgtctgtgcagacgagattttttcaacagcccaagagttgctgtccgagacggtattgttcgtccaactccggaaatgaaagaggagtcctagttgattcagacaagtcaagtaatccatctgttggaaaaagtgaaggaatccctatatttggcagagaagagtcagatccttctcaactgggaagagattatattcgacttgtgtcgctacttgttcgtatgcca

SEQ ID NO: 3175 - DNA, 431 bp, Cyanidium caldarium
  Clone ID: LIB190-062-Q1-E1-H9
agcttggaaaaagctctgttggaagatgaccttgatgttgtttgtgactttcggatcaccaaactttgtagcacacaagtctaaagtattgaataccagaaacaaattacagaggcagtgtggctgcgtcaacacaaagcgtgataaaaggactcaagtaccaaacacttgggttatgactgaaactacaggagtcaagcttttgaatggcgaacagaagatggagatgaaggcaacgaaagaagtcaaagttggagagcgtgtttctttttgcaggtgttggaagtcagcaaagcatccgtattgtgacggttcgcacaacaaatataataaggagaccggagatcatgtgggacctattgtagtagcagcagtgcaggctacagaatagttttattgtgttttattttcaataaagggtagcagtttgt

SEQ ID NO: 3176 - DNA, 355 bp, Cyanidium caldarium
  Clone ID: LIB190-063-Q1-E1-A11
gggtcgaggcacgcgtcagcccaagcgtccgcccacgcgtccggtgctgagcgagaggcaaggtgttatcatggcaaaggcagtgagaattggtgctgaaggttacaggttaaagttggacggtgcagttcaagagatagacggtcgttctgtagtcctggtagatgtggatagtattacccctctcatgtttggaggtagtatgaaagaaaaggccaaattgttggatgccaagtttctaaggagagtattatgaggagaacaaggacttcttcttcttgtcgactagagaagagaagaaaatgtttgtgacgttacaacttgccagggaatatgcagagctggtagatgacca

SEQ ID NO: 3177 - DNA, 199 bp, Cyanidium caldarium
  Clone ID: LIB190-063-Q1-E1-A12
cgggtcggccacgcgtcagcccacgcgtccggaacgatgcgcagtaatgtcgcgattgttttctttggtggacaaggataaagttgctgatataagagaacaacagaaaagaataacggacaagttgtcttccaataccgcaaaagtggatgagtgtgtgagggaactgagccagttgtatgaggaaacctgcagtgac

SEQ ID NO: 3178 - DNA, 167 bp, Cyanidium caldarium
  Clone ID: LIB190-063-Q1-E1-A3
gaatcggtacaatcaatacctgcagcgatgtaagagcatctttcctgcaatgtgatatcatggagggtgagaatcccgtttacctcttttccttgcaaggcagctgcgttaccatatttcatgttgtggagtctggttgtttgggagtacatccgtaaatttgttgg

SEQ ID NO: 3179 - DNA, 380 bp, Cyanidium caldarium
  Clone ID: LIB190-063-Q1-E1-A5
agcgacaggagcactcgacattggactgaactacgaagaataagactctttgtacaaacacaagaaaaaaagatcaactgttaaagctaactgcttgctgttaccaaccactcgcgcatttgttgtgcttgtttctggaatatcgaaaattcttgttctgtgtctactttttacttaggtgtcaccaacgtgcagcgaaactggtaaatagaacacgtgcccagtcaatctgtgcaaacactcttgtgccaaatacagagggtctggatgagtcactatcttctgagaatgttttgaagcatcttcccttggaagagaatgtcgtctcgagttttgtgtgtggaaagaacgtttcagttcaaagcaacttatcttcaata

SEQ ID NO: 3180 - DNA, 386 bp, Cyanidium caldarium
  Clone ID: LIB190-063-Q1-E1-A6
agcccacgcgtccgcccacgcgtccgcccacgcgtccgcgcaagtgatttcggaacaaaccattgaagaaaaagaaacaacgaaaacagctgttattgcaaaagatcttttggctggaactgcaggaggaactgcacaacttttagtgggacacccgttcgacaccatcaaagtaaaactacagaatcaaccttgggtcgctccaggacagactccacaatataccggtgcaattgatgcagtaagaaaaacggttgcaagacaaggccttgggggtctatacaaaggaatgggagctccactggctttcgttgcagttttcaacgcagttctgtttgcttctaatggtcaaatgaaaagaatcgtccacggtgaaggtaacaact

SEQ ID NO: 3181 - DNA, 400 bp, Cyanidium caldarium
  Clone ID: LIB190-063-Q1-E1-A8
agcccacgcgtccgtattttctataaataccaacatacatattgtattctgtatgtttgtggttgctttgaattgcttaccttggctaccaaaaacagttcgttcctattctttttttggttatacacccaactcgaaaaccaaaccatcgaggaacttggtgacttgtttgaaaaaggagcgccataacaagaataataacactacgaataataattatcattctcattgtaaagagttacccaatattgattccaaaactttattgagtctaggacttgatatacataccaagtctatagggtttgccatagtctctggatggacaggtcaagcaattcgtcacggtatgatccaactacaacatatggaaggagccgatgtttttgataaagttgac

SEQ ID NO: 3182 - DNA, 406 bp, Cyanidium caldarium
  Clone ID: LIB190-063-Q1-E1-B1
acgcgtacgttaagagactactgaaacaccaaagagaattcgtattactttgaccagtaaaaacttgagggcagtagaaggagtatgccaagaactcgttcaaagagcaaagatgaacggcttgagagttagaggtcccgttcgaatgccgaggaaaactctgagaattactaccaggaaatccccttgtggagaaggaaccaatacgtgggatcgcttcgagctaagaatatataaaagagtagtcgatatatttgcgacggctgatgtagtgaagcaagttactgcatatggtttcgactctgaggtacaaaccgaggttactattagcgattagatagactgcaagaaaaataaaacaggcgtctcgtgggaatttaaaagaaaacacaaaaaaaaagggggg

SEQ ID NO: 3183 - DNA, 403 bp, Cyanidium caldarium
  Clone ID: LIB190-063-Q1-E1-B10
cgcgtacgattacatttcacattctccttgtagaaaactatgaagtctttcggaattgctattgttttcctaagctttgttattgcatcttatgcagcagttgtatccgaaatggcatccaatgagtttcaaagaggaggatacgctccttctccttccaaggaatgctgcatgaccacttgtcaatatgcagaactttgcccaatttctcaaccaacttatagccaaggctccatcttacattccatctcctacctatggccaagctccttcctacaatcaatattcttcttcgtacggttcctctagctatcgtctcttaactgcagacgaaaaccaacttgtgagcagaggaggttatgcaccaacaagccaatgtattctagttcctatccaatgctgc

SEQ ID NO: 3184 - DNA, 389 bp, Cyanidium caldarium
  unsure at all n locations
  Clone ID: LIB190-063-Q1-E1-B12
cgggtcgggcacgcgtccggcgtttcgtatggatcgcaaacaatatcgagcaagtgatagaactgggtcgtattttgagaatagaaacgccgactatcgaaaccatggacgaaaatatgtggcttcttcgacaaataagaagtttttccggcgtcgagtttattcacctaccttggacactacaaggaaagaaacgaaggacgcttattgggaacanacaagacaaactgccagtggcacccagcacaaaatataaagacgatagaagttcgacctatgtaaatagccaggaaagttattcaaacttgggcacggaggaaagggaatccccagcaactactacagaacttgaacaaacttcatcctgngacgcctcgtgtgtgaaagac

SEQ ID NO: 3185 - DNA, 394 bp, Cyanidium caldarium
  Clone ID: LIB190-063-Q1-E1-B3
agcaagcaaagaagtgacgcagtagatcagagagtaacacatgcaagtaggtaaagcgaacgggtgagtaaagaggtgtgaaagagtgggagaacatgaaagcaccagaggatgttagaaatgggtatagttaaaacccttaagggagttaaagcgcggaatctcagaagaggaaagccacattgtggactgagaaaaagtgcaaacacgagaagtcaccactggggaaaattgggcaatgtacagggaagtatgacccagtaatgaggagtggagtaaacagaaaaggaagtaaaaggagggaatgaagggaagttatggcaaaaacacgtgccagcagcagcggtaaaacgtgtgtagcaagcgttgagcagaaaaaactgggtgtaaaagt

SEQ ID NO: 3186 - DNA, 260 bp, Cyanidium caldarium
  Clone ID: LIB190-063-Q1-E1-B4
gataatgataataggagggagtagtacagtaattgtaaaaggaaaaggaaaggaaagaaagaggaaagggataaaatgcaaaaatcccaaaaaaaaggcacgaaagaaaagaaaggaagacccattaaataaggcaagaaaccataggaattaaaccggataagaaacccttttatccaagccattaaagaaacaattaattataaaaaaaggaattcattcaacaagggaattaaaggcccacaaacaaaccccaaacc

SEQ ID NO: 3187 - DNA, 369 bp, Cyanidium caldarium
  unsure at all n locations
  Clone ID: LIB190-063-Q1-E1-C11
cgcgtcagggggaaaagangacgaaatgcgagctgcattgagtttggctatttcccaacgggagttgattggatcgtttcctgtatagtctattcatgttgatatcttttgcccattgtcattttgcacttgtaaacagaaaaggcattcagacaaggaaatattgctcttcttgcaanggaacgtatttctgtagttggcaagcttatcctggagatgactggatatctccatttgcagtggaagtcagacatacactattttaataatcatagcaacggtggtagcagtaataatagtgaaagcccaatttcagcacctagaatacttgtattatatggttcgttaagacaaagttctttatcccga

SEQ ID NO: 3188 - DNA, 382 bp, Cyanidium caldarium
  Clone ID: LIB190-063-Q1-E1-C6
ggcattgtggttgcaaaggggtttgtataggtgggagtagtgaagataagcaacaagaagaaacatgacaagcactgtactagttgggaaatggacaagtttgctacgtccaacgttgggaaaaaacacggtaccagtaacaagctggaggaggggtttcgcttccctttccccaaaggactctcctgttcctttgtccaaacctgagggctcgttagaatatgtagtttccaagttggacgacctttgcaattgggctagaagcaattccctatggccaatgacttttggtttggcttgttgtgccgtggaaatgatgcatgcagcagctcctagatatgacatagaccgcatggggatagtctttcgtccttcacctaga

SEQ ID NO: 3189 - DNA, 377 bp, Cyanidium caldarium
  Clone ID: LIB190-063-Q1-E1-C9
gcgtcagcccaagcgtccggcttgggagaaacggatcgatccctgttttgcaagagacaatgagcagcaccaactccacgacttgttcgcggtttcaacttttacaagctgcttttgacaaggcggtttccacgtttctagaaaacggctgttcttactctaagttttccgagttcttccagcccgttgcctctgtttatccagaggaatttgagctgttgcataaacaacttccaacaactcttagatataagactaaagcaagaatttcagttattgctccaagataaagatattgcaactaaactccaggtttgcgaccaactcttccaaacgtatcatgtggatagaaacggttatgtgagaatacctttgaa

SEQ ID NO: 3190 - DNA, 383 bp, Cyanidium caldarium
  Clone ID: LIB190-063-Q1-E1-D1
agcccacgcgtccggttgcgaagcgttgtcgttatcgtctatggcggtatttgaaagtgatatagttggtcctgcaattcactttacgaaaaagtataattcaaggaggcgctacaaggagtgcatttcgtgctttagtgcttcgggtggtaaaccagggtggttcttttgacataagccgaaaattactcgcaacgggctatacgactgataagggtatgaagaccaataatggtgctgttcgagaaagtgacttttacgagagagtcttttcaagaatagcttcaaagcgctctgacttttggaaagaagtttctgtaaccttagtagtctctaccattgacaccgagtcggataaggttatttcagtgtggaacgcgttt

SEQ ID NO: 3191 - DNA, 376 bp, Cyanidium caldarium
  Clone ID: LIB190-063-Q1-E1-D10
cgcgtacgcggaagcgtgggagagattggaagagtcgtcctggtgaactatggcaaagaccgaggcaaactgggagtcattgtggatgtagtagatcataatagggcgttggtagatggtccactcacgggacttgcgagacaaaccatcaactggaagagcttaacgttgaccccgttcaaagtaaagattcaacactccagtcgtacaggagttgtgagaaaggcatgtggaagaggcgaaaatcacggaacaatggcaaaatacggcgtggtataagaaactttgtgcacgaagaaacaaacaaaaacttggagactttgatagattcaaagtgatgattgccaagaagagaaagtcggctatgattcatagt

SEQ ID NO: 3192 - DNA, 337 bp, Cyanidium caldarium
  Clone ID: LIB190-063-Q1-E1-D11
caattctcgtttttatcttacttgggcacagattgagttgcgtgccaagaattatgaagaagctgctcgtctcgtctctttggtggagccattgggacctaccaatgtgtatctatggcaaacctatgctcagatagaaagtgctcaaggtcatttgggacaagcctatcattactatttgaaggctcttgagttggattccaacaatgtaaagagttatggaatgtctggcaaaattggtagccaaaaagggtaatgttgatgaatcaaggagtatttttataaaagctattgagttggtcgaaaaagatgcccgtttatatgcatgtttggccaa

SEQ ID NO: 3193 - DNA, 392 bp, Cyanidium caldarium
  Clone ID: LIB190-063-Q1-E1-D2
acggcaacggaagacacgtttgtacaacttgcgaaaactttaggagatgggaaaacgccgcaagttatgagaaaaagatattcacagttgttgcggtgggtacagcaatcttccaaatctgtccatcgttacaacaaatgtgagacttgaatgttgttaaaagtttattctccagagcgcttgaatggtggtagacgtagttgtaataataataagtcataactggtgtttcgtccaattgttaaggacatcactaaatacagttccttgaacggcataacaaaagtcgtcaaactgaacgttacagaaaatcttatggaagctttccacactgctccattgtaaagttatatgtcttgaaaatgaaaggttataacaaatatcaaaataaa

SEQ ID NO: 3194 - DNA, 379 bp, Cyanidium caldarium
  Clone ID: LIB190-063-Q1-E1-D3
cccacgcgtccggtcgattgaaagtggaaaaggaattgactggtcgactgcggaagccttggcaattggcactttattggcagaaggaacaagtgttcgactgagtggtcaagatagtgaaagaggaactttttcccaacgtcattcggtttggatcgatcaagaaaatgaagctgttcatattcctttgaacaacttgggaatgacgcaagctcgtttccaagtctgcaattcgagtctttcagaatatggcgtgatgggttttgagttgggatactccttggaaagtcctaatattctagtgatatgggaagctcagtttggagattttagtaacggtgctcaagttatcattgatacctttttagccgcaggagaa

SEQ ID NO: 3195 - DNA, 364 bp, Cyanidium caldarium
  Clone ID: LIB190-063-Q1-E1-D7
agcagacgcgtccgtcaggtcgatcatcagatgtcggagccaatggagatgtcgcttggcgtgtttcaagggaccctaaagtgcgacgcagactgagacggtgattgcggtagcacttatcagttgaactttaaccagtatggtcaccatttcaagtgacctttcgacgagagaatgtgttctgcacatcgtgttgggcctcgcgtcgggtctcgtctcaagggagaccctctaggacagtcacaacctatgtgaagacaatgggggtgcgaattgaatggatacagttgtgacgatagttgtcaacgtatgcatccgtgtcagcatactgggagacacgagtgtagaaccgtcgcctcatcgt

SEQ ID NO: 3196 - DNA, 399 bp, Cyanidium caldarium
  Clone ID: LIB190-063-Q1-E1-D9
ggtcggccacgcgtcagggaaagaagaaagtgctgctcgtaaacaagcacgaattgattctggtgaagaaactattgttggggtgaacaagtatcggctggagacttcatcatcatcttccaatacagactcttccagtcagaagtctgaacagttggaaatcttgaaaatagatgcacaacgagtacgagattctcagatagaaagaattaaaaaagtaaagagtagtcgagatgaggagaaaagtgaagcgctgtctgatggagctggaggaagcaggaaaagataaaagcaagaatttattggaggcctcagtaaatgcagctagagccagatgtactttaggagagatttgtggtgcgctggagaaagtatggggaagacatgttcccaaagatg

SEQ ID NO: 3197 - DNA, 375 bp, Cyanidium caldarium
  Clone ID: LIB190-063-Q1-E1-E1
cccacgcgtccgggaagaagatggtccaagagatgcgacgagcggttgcttctcacgctttacgtgcatatgtccctggcaagtttactcgttccgtactaagtatcttgtgcattataagtgcaggtgttattggtgctgtgggagttgtttgttttatattctgtagtatcaatccgagaaacgttatcatcaatgtatatctcattatatttgcagtgttgataatcctttccgagttgggtttcagttttctgttgaagcggtttgcgtttttagatacgttttttggacctggaatattttacattttcgtgggtttactggcagtggatacgcactggtttcagatattggctggtgtatttgctgccg

SEQ ID NO: 3198 - DNA, 391 bp, Cyanidium caldarium
  Clone ID: LIB190-063-Q1-E1-E2
agcccacgcgtccggtaaaatatgtcgaacgaaccaaatatttgtgaggcgttggagacagctcacaaaacgtgcctccgtaaagttaaacgagctcggaacaaggaagcaaagttgaaagagtgtcagagttattttgatatgctgaaggataatagttgcccttggaaacctgaaacaagcaagcaggacgctgagaaatagtgaagctaaaatatcaagtagaaggaaacatactgattttaaggaaacgaaggaagtttgcagttatatttgtactagtaacaagtatcaaccttgctcgtccctgcgcttcacaagactatttttttacaacaaagtaggacgcaagacagggatatacagtgtagcactacctcccttttggagt

SEQ ID NO: 3199 - DNA, 390 bp, Cyanidium caldarium
  Clone ID: LIB190-063-Q1-E1-E3
agacattttccacttttatgggcatttggtttgcgaagctttggcgaaggctttatcggatacaggaacttaaagtatgtatgatacgtcttgataatgcacgcaagactactatactgtatcgacttcatttgggagatgtggtaatcacaacacccactataagaagtaatgtagaacaagtcaagtgtcgaaatcttttatttcaagtatgggacttgggaggacaagacagtcttcgtgaagcttggcaaacttattttgtgaatacgcaagccattatttttgtggtggacagttgtgatagagaaaggttcgatttgtctagaaaggagctgttgagagttttacgaatggaaaatctatccaaggctgtgttgttggtttttg

SEQ ID NO: 3200 - DNA, 130 bp, Cyanidium caldarium
  Clone ID: LIB190-063-Q1-E1-E4
agacaaagtggagctattgccaggcacttggcaaggaaacatgacaaatatgggaagacagaagaggaaaaagccttgaacgatatgctttatgatatgaccgtcgatattcacagcatatacctaaagc

SEQ ID NO: 3201 - DNA, 180 bp, Cyanidium caldarium
  Clone ID: LIB190-063-Q1-E1-E9
actgagtatcaggaagaaaagagggagtagatgaggaaagaaagatcaaggaagtaagagtaagagaaggagtaatgtgaatgaaagcacgaaagtatttgaagaagagagtgtaaagcgcgtaccttttgcataatgtcccagcgagtgaaagagtgaagcacaaagaaagaaaaagaa

SEQ ID NO: 3202 - DNA, 292 bp, Cyanidium caldarium
  Clone ID: LIB190-063-Q1-E1-F1
ggaagcagaccacacgaactttggcaatggcatattctgtttggataaactggactgggtttccaacagaaaattggaaaaggttgcagctctgccgtgaccgagatgctgcaaaagtaatcgttgcacagttggatagattgacggcagtcatttcggtcatccgtcatcctgcaaaatgctttcgtctaatgtctcacgtgtgaaaaatgcagtgttacgaagtgccgatcgcttgtaactttttcctacaaaaattctctctggaaaattaagtcgagaaatatcaatt

SEQ ID NO: 3203 - DNA, 372 bp, Cyanidium caldarium
  Clone ID: LIB190-063-Q1-E1-F11
cacgcgtcagagcagatttcaacggtatcctgtttgaaggagggaatatggaggttgtcaaggtcggctttgtagctcagcagccttgggagagctacagtaccaatcgtcgcagcttattacgtacaaaacgtggccttggtcgtactcgaaatgtttttatgacagttacaccagataggaaacttgggacctctgggccagttccacataccattgcaccctcttggtggaaaactttcggatgaagagaagaagagagccatgcaggtaaataagcctgaaggagttacattttctgcaaagtatgtggcttttgaccaggacgatgattccgaatatgacttgaatcaagtcgtttatccagcaaag

SEQ ID NO: 3204 - DNA, 388 bp, Cyanidium caldarium
  Clone ID: LIB190-063-Q1-E1-F12
gcgtaagagagagaatgccgccagtctccgcgtttgtggttggcacaccttttgttgtagaaactggttattcgacttgtttgcgttgcaactctttcaacaacaagtgtagaaatactaacttgtactcagtgactctgcctcacaagaaatggagtggtacctattcccagttccatggcaaccagtccattcttcgacaaactcgactccctttttctttcattccgcatagaaaacaacgacgatatggaccttttaaaccccattcgctgtgaagaagaagattattatagtgttcttggcgttagtcgtaatgcaggtaccgaggatatcaagaaagcctttagaagactcgctagacgttatcacccagacgtaaagaaag

SEQ ID NO: 3205 - DNA, 319 bp, Cyanidium caldarium
  Clone ID: LIB190-063-Q1-E1-F2
aggtacttgtcagttggcaaaacaggctttcgatgatgccataacagagttagatactctttcggaagagagttacaaggactctactctcattatgcagttgttacgtgataatcttaccttgtggacttcagatatgggcggtgaagaagatggaaacgcaacgaaaccagacggaaaagttgaaccagacccgaacaaaaaggagtgatagataaaagcatgtgcgatatgtgtgtttttgttttcgactcgcacattgcttttgcacgataagaacaaagaaagagagatacttgaatatgcaagacagatgaat

SEQ ID NO: 3206 - DNA, 382 bp, Cyanidium caldarium
  Clone ID: LIB190-063-Q1-E1-F3
aggggttgtggaggtggtatgaggaatgcttaggtttgcagtagactatacttttcttgccccccatgagggtaaaagcaaactatgattgaacgccttcgctgtgttgtttgtggggtaaccgatactcctttgtggagaagtggaccgagaggaccgaaaacgctttgcaacgcctgtggggtgcgttggaaaaagggaaagttgtatatagatggaaagcaagcgtccccaccttcagcgacaatagagaaaactagacaaaagcaagcaaaggttgacaaagttaccacctcgcttcactcccaaagttatgatagtcctcaccaaagttgtgcagtcgaagaaccacaagcctccaaatatgaggctttcccaaaat

SEQ ID NO: 3207 - DNA, 388 bp, Cyanidium caldarium
  Clone ID: LIB190-063-Q1-E1-F4
agaaagattaaagagtcgccctggtcgaccatcaccgccatttctaggatttattatggctgcaaatggatatagtttagacaagcaatccattgaaagaatattacgagaaattgaagaacaaaatccttggtcacaaacagtatcatcagatgaaaatggtgaggtgaaaagcttataaaaatgttccacccaaggtctttacgtgaaggtttgatatacaagatgtaaataatatctttgtgtgatatcaaaccgcgaataaggaccgagatcaaaaatcgcgcttgacgatacgggggagtgcatcaagtaaaagtctctcatctcagacttcgcgaaacattattaaaaggttttccttatcacaacttatctcgaaataata

SEQ ID NO: 3208 - DNA, 394 bp, Cyanidium caldarium
  Clone ID: LIB190-063-Q1-E1-F7
ccacaagttgatagtgagtggaggagatgaacctttcctttatatatgggatactcgctcgggaaagcttgtaaacaagttagatttggatgcccattgtatcaagtctgccgaaatatcgagcacgggttcttttaccaaattaactgcagtaactggaaatagtttacaattttgggacttgaatcaattatgtagaatggacactatgtctatttcacaagatgcagaatgtgctagctcaagtggaaatcacgtcgtcgtcggtggtcgtgacttgcaaattcgactctatgacacaaatacaaagcaagtgctacatacttttcatggtcatcatggccctgtttggtgtgttcgtttttctcctttaagttatgggtttgcctcaagg

SEQ ID NO: 3209 - DNA, 227 bp, Cyanidium caldarium
  Clone ID: LIB190-063-Q1-E1-F8
agaaaaaaaaaaaaaaaaaaaaaaaaaaaaaaaaaaaaaaaaaaaaaaaaaaaaaaaaaaaaaaaaaaaaaaaaaaaaaaaaacaaaaaaaccaaaaaaaaaaaaaaaagggaaatcaaaaaagggggggccgccctcgaggttctagtctttttttccccgtccagccaattttagaccccttccattgggtccctaaactttcatttcatggcccgtcgctttta

SEQ ID NO: 3210 - DNA, 326 bp, Cyanidium caldarium
  Clone ID: LIB190-063-Q1-E1-F9
tgtggttaagtttattaccaggagtgcccgttggatgtttcattataggctttaatttccgagctagcaacatccatgtcgaagaatgaatttacatttggggtatcataacatattatatgttttggggttctggtatgggaccttatgcttgggtactgggatcggtaatatatccaacttatattcgaactgaatgaatggcgctagttacttttgtggacatacattggaaactttaataacaactaatgcctttccaacaataaaagaacaattaatggctcaagaaatttcaatgggttttaaggaaggtttgttaacaa

SEQ ID NO: 3211 - DNA, 285 bp, Cyanidium caldarium
  Clone ID: LIB190-063-Q1-E1-G1
agttctctttcaaaatccagtcacaggacttggccttgcaagtatttggatcgtattgttaggttctcttagttattctatagtgcgtcgtagagagatgatacaaaaggcagtccaagaacgtttaccagagaaagtatgaagttgcgtattttatttttaggagacactggagttggtaaaactgtaaggtgaaagaagattggtatgtcttagtaaactcatagagttactaaaaaaaaaaaaaaaaaaaaaaaaaaaaaaaaaaaaaaaaaaagagagaag

SEQ ID NO: 3212 - DNA, 61 bp, Cyanidium caldarium
  Clone ID: LIB190-063-Q1-E1-G11
aacacagcactctgcagaaaagagaaaatgtaaagtataaagtgtgcggcctgccaaatag

SEQ ID NO: 3213 - DNA, 392 bp, Cyanidium caldarium
  Clone ID: LIB190-063-Q1-E1-G12
cgcgtcagcggtagcgtgggcggacgcgtgggcggacgcgtgggcggacgcgtggggttgaatgagtgccgtcagttgtatgaacgagcggcttatttgacagattcggaactgcgaaggtttcggttggaataccatttagaaatgaacagagcgctttatcgacttgcttatgaacactggaaagcacatatggattcgggcaaaagttgggagcaagttttcagactttgtttacaaacagcgcacctttttgcaactacaaagtgcccaacgataatatatttatatattacttgtttctcgaacggtatctcgaatttcttccatttcccattctgctttgcctgtcaacctcaacagcagattgtgatacctccaaccaagttgtg

SEQ ID NO: 3214 - DNA, 377 bp, Cyanidium caldarium
  Clone ID: LIB190-063-Q1-E1-G3
agcactgatccattgtttaccaaggaaacattcatatacgaaccaaaaaaacgagctgaaaacgctttgcatagtctctctttctttcaatgtttcttaccgcaaactgcatttggtttatatttcttctgaaacttgtttaacgcaagttggaacaactcttctgcagcgttcgggggacatggaacgatgaaagcaaaccttgccctggttcttgaacgaagtgtgtagtgtaaactgtgaaactacagagtattataaaaagaacggagttcgtgagcatccataccaaatatgaattcaccttggatatcgaaaacactccttttccgtctttcttcttcagcttcttcggaaagggctttcattcgcagttt

SEQ ID NO: 3215 - DNA, 373 bp, Cyanidium caldarium
  Clone ID: LIB190-063-Q1-E1-G5
cccacgcgtccgcccacgcgtccggacaatacctagggaatatgttgaattggcaacttggcgttatcaacagtttaatgttcgaagaggtgcactgttgaatagggagcaaagcaaggaatcagaacattccaagttggagagttactcaggaaagctgggaggtgaatatttttgtttgtggtttagtgaaaatgtttttagtgtcgacacaatagaagattatcgcaagattgcagcgcatcattattggcgtaagaagaatgggcataacgttacaaaccaaacggaaaacgacgaatctagtaaaagtgccgttattttggccgagagagaagagaaacaattcacggattcggtatatagtgagaaa

SEQ ID NO: 3216 - DNA, 372 bp, Cyanidium caldarium
  Clone ID: LIB190-063-Q1-E1-G6
ccggctcgacccacacgtccgctgagaggaggaaagccacattggaattgagaaaaggtccaaacaagagaagtcagcagtggggaaaattgggcaatgtacagggaagtatgacccagtaatgaggagtggagtaaacagaaaaggaagtaaaaggagggaatgaagggaagttatggcaaaaacacgtgccagcagcagcggtaaaacgtgtgtagcaagcgtagagcagaagaactgggtgtaaaggtcgagtagtagagtaagtgtaaaagggaaaggaaaggagagaaagaggaaagggatgaaatgcagagatctctagagaaaggcaagaaagaaaagaaaggaagacacagtaaatgaggcgag

SEQ ID NO: 3217 - DNA, 369 bp, Cyanidium caldarium
  Clone ID: LIB190-063-Q1-E1-G7
gaggatctcgtaatgaagtggaggttgatagcgcgttttcatccaatcgacgtcaagacgtccatcgagagtttgtaaacacggagagctcccattctcgctggaaggacaacaataaccatgaggttgcggacaattccatttcgagtgcctcaagaagaaacgtaatgatggttggtagttgtagtgagaattcacgttcgttcccggcaccaagtagaattcgaaagtccagattccatccatcagcgagacagtggagtccgaataagaaaccgcgtagaaatttggatgcatggcgtgactttcggaaacagaatggatggcactgacacgcggaagaaagaatgtcagagaggttggcgggtt

SEQ ID NO: 3218 - DNA, 376 bp, Cyanidium caldarium
  Clone ID: LIB190-063-Q1-E1-H1
agtgttggtggtggaaggcgtaactttgtgggtttccttacaagatgtcttttatatttcgtggaatcaaaggcctttccaatcctcgttatggacaacccgtggatttacccaccggaataatgtatagcttgaagcaaatgtcgtacattgtccagtttgctttttctgttgtagtcattgctatgttctcccaagttaccttttatctataccgtgactttaagtgtgctttcgatgggcattgggattacgccacgcatagcgaagtgtctggtcctgtgggttattgccgttacttcattgctttggggagcatttccatcgtacttttagctattgttgccgtagctacttttggaacgctgtattttga

SEQ ID NO: 3219 - DNA, 206 bp, Cyanidium caldarium
  Clone ID: LIB190-063-Q1-E1-H10
cacgcgtcagacacaatttgaagtttgttgggcaagttgagcttttgtattagcaccttttttgtggtttccctcgttgtgttttgtcttttcaaaactcgaagactagttatttcctagtatattttagaggctttttctagagtttgcttttggaattgggaaaacccgttcctcgtgggttgtaaagggttttatcaacaaaa

SEQ ID NO: 3220 - DNA, 318 bp, Cyanidium caldarium
  Clone ID: LIB190-063-Q1-E1-H11
tcttgaaagacataactgcaagtattgaaaagcctgacataaaatggataactaggacgaatctcagtacttgtctgaattctgcagaaggaaatgtcacggttgacttgtcgcggcagtgtagcttgaaggatatattttcattgaagcttctcgacaataactttaagttggcgtgttttaatgatgccttgttttttagttttaccaggcttatcctttgttattactggtaatcgtatattctgtagacgctcggacttgaatgaaacggaagcattggagtcctgcttttcgtttatgaagatatgccccacg

SEQ ID NO: 3221 - DNA, 406 bp, Cyanidium caldarium
  Clone ID: LIB190-063-Q1-E1-H2
aggagccaaccaccaacaacacgagatgaccgactccaccgctgctagttggagaacgagtacttcaccttcttgttccactttcttatcatggaagcgtctttatgggttgtatcaacgctatatattgcctgaatatcagaaacctctgttgtatactttcctaggaatattatttctctccttgtggcgactcgtatggaaagtatctcctctagacttgtttcactggttggacgtggaatattatctacaaaatgaagacggcactacatttggatatgtatattttcctttgggcactattctatggtttattatcatagtgactgtatttacaaaggtaaccaaccgtcttcagtctcactattattctagaagaacgagtttgatacttgtgtgtgtg

SEQ ID NO: 3222 - DNA, 358 bp, Cyanidium caldarium
  Clone ID: LIB190-063-Q1-E1-H8
ggcgggatcgaaactaacgatcgtggacttttcgactacatggtgtggtccatgcaaagttgttgctccaaaatatgaagaactcagcgaaaaatatcaacaagttgtatttttgaaggttattggggacaagaatggagaaaccaacaaaataatgaagtctttcggtatacgagcagtaccaacgttcaagtttatgaagggaaagaaaagtattcacgaggttgccggggcaagaatcgatgcgttggaagatggcataaagagctatatgtagttacttttggagcaaatgaataagcacctttatctattttccatatgaagaaaataaaaacaatttatgaagggaacaacg

SEQ ID NO: 3223 - DNA, 338 bp, Cyanidium caldarium
  Clone ID: LIB190-063-Q1-E1-H9
acgcgtacgatttagaaggagattcagcgcttagaaaatatattgaaaaacgaggaaggaaatatcacagattcgaaacgagccaattttttgcgtcgtcttcatatcctaaagtcgttcctttcgaatgaaacggaggaaacaaattcctaaaagttgctgtaatgttgtccagacacagatattgtcattcacagtgaataaagaacagaaatgcttgcgaaaaaaaaaaatccaaaaaaaaaacaacttaaaactcttgcaaaggatcgaaagagatcactaaattcactcacagaatcgataaaaaaaaaaaagggggggccgcccaaagggtt

SEQ ID NO: 3224 - DNA, 331 bp, Cyanidium caldarium
  Clone ID: LIB190-064-Q1-E1-A1
agcccaagcgtccgcccacgcgtccgggaagaaagaggcaaatacgggaaagcagtaaaagaagaaagagaaaggaaaaaactgagtatcaggaagaaaagagggagtagatgaggaaacaaagatcaaggaagtaagagtaagagaaggagtaatgtgaatgaaagcaggaaagtatttgaagaagagagtgtaaagcgcgtaccttttgcaaaatgtcccagcgagtgaaagaggaagcaaaaaggaacaaaaagaagtagccagctaagacccgagacctagtgatcgtatgctgtccaagcgaagtaaggctgaaccagtatctggt

SEQ ID NO: 3225 - DNA, 348 bp, Cyanidium caldarium
  Clone ID: LIB190-064-Q1-E1-A2
ccgggccgggccacgcgtcaggctagcggtgtgggaggtgtttggaaagtgtccaaccaagtgaatccatctcgactgcagcgcttggaaaggaatgaaagagtgcgaagagcacgttgggaactttatgactccaagttgccaaaggaacttcgagcacaattaatgccaagttctgacaaggaagtacgaagttttgtggaaatgagaatacgggaaatgatattgaacggagactttgaaaatttaaaaggcaaaggaaaaccattcaactattctgatgctgcagtgaggtagtttgacgttgctatgaagatgcttaaaaacaatgatttgaagccaccttgg

SEQ ID NO: 3226 - DNA, 360 bp, Cyanidium caldarium
  Clone ID: LIB190-064-Q1-E1-A3
caggtgatggtttaccgggctcgcccacgcgtccgaaaaaaactgggagaaacgacacgttatcgttggcctcatcgtcaggtctttgtgtgaggaatatcaacgacagtattcagagctatgttcaccgaatgaaagcacgaaagatatgctactagtaaacagattgtttcaaattcgggaggagtccagacaattgtctttgttcaaacaaagagtcgattgttttttgcggacacttgaagacagttggaattggataaaagagacgaggggagcacatacagaagagaagctttccgaggagaattttgtcggcaatagtatgaagcaagtcgtgactgacacaatagacttgct

SEQ ID NO: 3227 - DNA, 362 bp, Cyanidium caldarium
  unsure at all n locations
  Clone ID: LIB190-064-Q1-E1-A4
ggtcaggatatccgggccgagccacgcgtcagcccaagcgtccgctcttcaaaaaacagtttctgtccttgtgttggttgggtaatgtcttccgttcgaagggctagctcaaataccccagctactcgtgcaagctcaagtacttcttccggcgctaacagaaactcagctgtgggttcaaaatggagtgctggtaatctatcgggttcagcaaagagaattcaaaaggagctagcagaaattagtttagacccccctagtaactgctcagccggcccaaaaggagataacttgtatgaatgggtcgctacacttatcggtccagcagggtcaccttatcaaggaggtgtcnttttcttggg

SEQ ID NO: 3228 - DNA, 334 bp, Cyanidium caldarium
  Clone ID: LIB190-064-Q1-E1-A6
aaggagatagcaagggttatgaaaattttagtcagtgtaaagcgtgttgtcgactatgctgttaaagttcgagtaaaaccggacggttccggaatagatctcaacaatgtgaagatgtcaatgaacccgttttgtgaaatagctgtagaagaagcggtacgtttaaaagagtcaaaagttgcatcagaagttgttgttgctactgtgggaccttcgcaatcttctgaacaaattcgtactgcgttagctatggggtgctgaccgaggcatacatgtgcaagtggaacaagagttgccgccatccatcgtttcaagagtctgtcaactccttttt

SEQ ID NO: 3229 - DNA, 311 bp, Cyanidium caldarium
  Clone ID: LIB190-064-Q1-E1-A7
caagtattcaaataccaagtacaatacaggtttaccatttctggatgcagtgtgaagaacgtcagatagtcttcatagagcagaaattaatttcgggaattattactatataatcaaagctcttactttacgatgtagggacaatctgaaagtgctcttaagatagaaacttctctcagagtagttgcggggacgccttcgtcttcgtttaccaaaagggtctttttcagtgcaacaatttcgtttgttctaatatcttgagctttatacacctttccataagtaccttctcccaaaaaaaaaaaaaacaa

SEQ ID NO: 3230 - DNA, 381 bp, Cyanidium caldarium
  Clone ID: LIB190-064-Q1-E1-A9
gaccacgcgtacgcccacgcgtccgatttatcggagtgtatcgataatgcactaaatgagttggaaagctgcaaatgtattgcgttggaaggtcctgaagaaaatgaggaagagatgacggatgaagtgcaagtgaagaaggaagatgcagatactgcaataggtccattgaatttgggtatgattgctgcattttattatatacgatacacgacagtggaactgtttgcttcgagccataagcgaaaagattcgtctgagaggtctcctggaagtgctatcttccgcatccgaatattatactgttcctatacgtgtaggtgaagatgaaattttaagaaagatagctagtcatgccccgtttgctcctattggaagcag

SEQ ID NO: 3231 - DNA, 334 bp, Cyanidium caldarium
  Clone ID: LIB190-064-Q1-E1-B1
cacgcgtcagcccaagcgtccgggtggggtaacggatgaaagaccactgcatgaggataaggaatctaactgagtaaggaaaataagcttaagctagtttggctggggaagtaaagcctaagaaagagtaaattaggcaagcaaaggcatgagagaagtataatagcagaagcatgcttgaagaaaaagaaagagatttcagaaagggaagaaaagtcagctatagagaacaggtgaaggagaactcaaaaagaggagagcaccgaacgatcgaagaagaaacgttgggggtaacaggttaatgtggtgttagagaacgtatcaagcaccacga

SEQ ID NO: 3232 - DNA, 334 bp, Cyanidium caldarium
  Clone ID: LIB190-064-Q1-E1-B2
cacgcgtcaggtgatcctctttcttggcggcatgtactgacaagcaaaagtaagacatgttcttgtctgtggaaagaaacactttgttcgtaccatcatattcccccagttattgctgccatgcttcgtaccacataggtgcaagcacgaggaaacttgtgcctaaatcttcctccagtctctacgaaataccatcggctttaactaggtggaccattctccatcgtcgtcatcattgtcttcttattcctaccagtggctaccacaatactgcaacacgatgtggcaagtcgtctcagcgcaatacaacggacgatagcgggaacagcaacaa

SEQ ID NO: 3233 - DNA, 317 bp, Cyanidium caldarium
  Clone ID: LIB190-064-Q1-E1-B4
cacgcgtcaggcgacttttgaagcagttccacaggcgatgcgggactgtcccgttcactgtcggtctttctactcaaagaagactaggttcaaagcctaccatactatgagacgacgaagcagaacatacaagtgtcgggttccaccaaagtttctcccgagtccgcctaataaataaactagtacgacgcgtggagatttggttccttctcaagcaagataacagctgtaaaccaatccttttcccagctaacagcctagcaggagatgagcagtttagcggggaacagagcgatacaaagtttgctgtcattttt

SEQ ID NO: 3234 - DNA, 325 bp, Cyanidium caldarium
  Clone ID: LIB190-064-Q1-E1-B6
agcttgtctttggcgttgcgtcactatgaaaattcgttgttatccacgctttctcaattgtctctagtatggagtagaatgaacttggagtttccgacagattcagctgcatttcatgttatgccgtctatacattttcaggaatcatctgaagaacaagaagggccaagtgggaaacgaacaacatttggtcccaatgaatgggaacgaatcgttgccgaagaattgccctacaataagatttacattcccatgcacgccacttcgaatggaccagatactctattcaagttacgtgaacatactaagaatgaaaccttgcttg

SEQ ID NO: 3235 - DNA, 332 bp, Cyanidium caldarium
  Clone ID: LIB190-064-Q1-E1-B8
aacatgaagttggactagttcacgtaaatgtaactcctatgccgtggatggtcctggtttattaggttgtgagattcgtcagttcttatcgtgacttgttgcaaagctgactggtgaaatgtagtttatatatttcaggtgttgcaaggaaagattccgattcgaatacttgatggcttttatatctacgtcaaaatggttctagctaggtgttgttttgctgtctgtaaagcgtgcgagaaaccctgttcagtaagctctggtatcaagtctctggggtcagtcgaatacatagcaaactctatacgacttgatagttcgatagagtcggt

SEQ ID NO: 3236 - DNA, 265 bp, Cyanidium caldarium
  Clone ID: LIB190-064-Q1-E1-C1
cacgcgtcaggccaagcgtccgcccacgcgtctggccacgcgtccgcccacgcgtccgcccacgcgtccggccacacgtccgcccacgcgtccgcccaagcgtcgacccacacgtccgccatgttttactggatgctcgaaaatgctcctcgaacggacttatagatgcttatcgatggagctttccgcggtgtaatgacttgtaataataaagttgggttgcttccatttagtacgatagacaatcacggtgtttccatacgtt

SEQ ID NO: 3237 - DNA, 357 bp, Cyanidium caldarium
  Clone ID: LIB190-064-Q1-E1-C12
cccacgcgtccgcccacgcgtccgcccacgcgtccgctgccttttgtcgtaaatgtattgtttctgacaaagaatttgaaatgtggggcgatggagaacagactcgttcattttgctatattgatgacgctgtggaaggagtgattcgcttgatggagtctgactttgctgaacctctgaatattggttcagaagaaatgatatctatgaacgaatatggcaaaactcatcatgtcatttgaaaacaaagacctgaaaatcaagcatattccaggtcctgaaggagttcgtggcagaaacagcaacaatgagctttgcaggaaggttttgggatgggaacctaaaatcagccttgcc

SEQ ID NO: 3238 - DNA, 332 bp, Cyanidium caldarium
  Clone ID: LIB190-064-Q1-E1-C3
agcggaatttataagacatcgtacagacggagatattgaaaaggctagacatgatgataacgcagatctacgagatccgcaacctgatgagagtagagtagaggatcctcattggttagtggttattgggatttgtactcatctaggctgtattcctatagccgacgctggtgactatggtggctggttctgtccttgtcacggttctcactatgacgttagtggccgcattcgaaagggacctgcgccttccaacgtggaaatacctccgtacaagtttagcgaagatggaaaaatgattattggatagtttgtttggaatgtttcgttgt

SEQ ID NO: 3239 - DNA, 346 bp, Cyanidium caldarium
  Clone ID: LIB190-064-Q1-E1-C4
ccgggccggcccacgcgtcagcgaagaaatcaaccccttgttttggtggtcagatgaagatttactgctgttacaaggcagtccaactttatctgcttgtcagcaactgagagaaaaacttgtgagagagtatacatatctagagaagcatattattccacaaatcccgaacctggcccgtatagactttagacaatttcagtgggcatttggtattcttttttctagagctatttgttttcctagtacgaagagaattgcattggtaccttatgcagatctgctcaatcagagtcctttttgttccgcctttattgatgaagaaagtattccacttggaaatgga

SEQ ID NO: 3240 - DNA, 319 bp, Cyanidium caldarium
  Clone ID: LIB190-064-Q1-E1-C7
aaaagaagagtgcaatggttgaaaagtagaaacagagtactaaggtacctgtagaggcgcacttgaaaaagtggtcacgtccttttacatgtctacaagtattttttttgcttgtagagattgcaagtttagtgtacttgacaaggtttccaagtatcattcagtgcctttaagcacgtgtgagtgtacttggaacttttcaagttgaataggtagacgttgttgacgaaagtatgtagaaaaattgaagcgttattaggttaagctagaagaatttaccatacgagaaaagtaaacttgaaatttttctgattaaaaa

SEQ ID NO: 3241 - DNA, 359 bp, Cyanidium caldarium
  Clone ID: LIB190-064-Q1-E1-C8
aggttgcggttgacgtggggtagtggtcaaccaagagtccttgggacacaaactatgtccacaacttcataagtttgtaaagtttgagtacttgcaatgagctatctagtaggaaataccgaacaagatttacaagccaagaaaccaacatatgaagaactggtggccgaactatctcaactcaaggcggatttattcgcagaaagacacaaaagaaaggtagttgaacaagagttgaaagagttgaaacagttgtcgttttctaggcagactcatatcgaggcagaagaggagtatattgcgaataaactcataaaacggctcagagagttgagggaggaaaaggaacgcttggcggt

SEQ ID NO: 3242 - DNA, 323 bp, Cyanidium caldarium
  Clone ID: LIB190-064-Q1-E1-D1
ggaagaggaaagagatggtggacaaggcaatagccactggacgtttcaaggaccgagttattattataactggtgcagcaggtagttttgggagtaactgtgccaatcgattcgcgtcagaaggtgccaaagtggttatcacggatattgttgaagaagcaaagcttcaagaacaagcaaagaacattgaaaagcagttcaacaccaaggcagttgctgttcgttgtgatgtgacaaattacactcaagtagagcaggtagtgaagacggcacaccaagcttttggtagaatagattaccttttcaacaacgctggttatcaa

SEQ ID NO: 3243 - DNA, 360 bp, Cyanidium caldarium
  Clone ID: LIB190-064-Q1-E1-D11
gacccacgcgtaaggacaagtagcaaaatgggcaagtcttgtaaaggcttgtttgatgaattggttcgttgtctgagtaactccgagtgtgtgaagaaccatcctgacaaaaagactgctttgaaagactgtgcaaagagtaatgggaacgatgtttcggactattgcaagggagtaaaggactcgtattataaatgtcgtcgagcagcgtttgatatgagaaaacgcatttcagagagtcccagggtattagttgacaaagtagtttgttaacaaagtagttgtatattctcagaagagttgcagacattggactaggaacaagtgtaagcggctagtaaatttttattcgttatggac

SEQ ID NO: 3244 - DNA, 336 bp, Cyanidium caldarium
  Clone ID: LIB190-064-Q1-E1-D3
cacgcgtcaggttagatttcctgccagacaaaatgaacgacgcacaagtaaaacaacaagtacagcagatggtctctttcattaaacaagaagctgaagaaaaagcagacgaaataagagtcaaggcagaagaagagttcaacgctcgaaaactgagtcaagtagaggcggctaaaatacaaattcgctccgagtacgaaagaaagtttaaacaaatcgagtccaaactaaaagtcgcgtattctactgaacttaatgcctcaagactacaaatcctgaaacagagggaaacccttcttaaggagatttatgaagttgttgaaagagaactttcca

SEQ ID NO: 3245 - DNA, 318 bp, Cyanidium caldarium
  Clone ID: LIB190-064-Q1-E1-D4
cacgcgtcaaccaaatcggcgtcgtcgtagtacattcctttgggcatacttgtacaaccatgaagtacttggcagcttattttttggctaaaatgggaagcaaacaaggcagacctactgcagatgatgtgaagaaaatattgacttccgtaggtatcgaagtagatgaaggtcgtctcacgcaagtcgtggaagctttgaacggaaaagatttgaacgagttgatcgaacaaggtttacagaaaatgtctacggtgccttccggtgccactgcagctgttggagcagcagttggtggagcaactccggcagcacgag

SEQ ID NO: 3246 - DNA, 345 bp, Cyanidium caldarium
  Clone ID: LIB190-064-Q1-E1-D6
agaatccccaaacgatgctgttgggtcaggaacctagacaaaccacttccaacgtgggatacttgaacaaaccttccattcaagcgctaatccacggcttaaatcgacattattattctctggcagtggcttatcgtaagaacgagctggaggaacaaatgttgctcaatttgcataagaaacactggagcagaggcttaaaagtgacagactttgaagagcgagctgagaaaaatgaaaaggcagttcagtccatgttggacttggcaaagagttatagcaaaatgttggaagaagaacgtcaaatgacaaaggaacaggctgcaattgcaaatgttgggaaag

SEQ ID NO: 3247 - DNA, 323 bp, Cyanidium caldarium
  Clone ID: LIB190-064-Q1-E1-D7
agcccacgcgtccgcccacgcgtccgcacagtctgtgagatggcaacgttgctgcattctagtcatggcaaggcacaagttcgacttgccaccgcagatggaggaccaggtcgatacaccgaacttttccaagaatttgtggtccaagtttctcatgaaagatgcacggaatcgtcgtttctccgcggtaacaattctcaagtagtcacaaacgatacttagaaaaatataatttactgggtagtgaaacatcacgcttgtcactcgggtgaaaaactggctatggacattggttgtatcttcatggcacactagacctttgt

SEQ ID NO: 3248 - DNA, 323 bp, Cyanidium caldarium
  Clone ID: LIB190-064-Q1-E1-D8
gaatggacgataaggaactaggcaaaaggatatggtatctgcggtagaacatatgaaagaagcagcaccgactgtttagcaaaaacacagcactctgcagaaaagagaaaatgtaaagtatacagtgtgcggcctgccaaatagtagagaagaaatcgatgaaagtgaaagcgagtaaaagatgaggtatagagaatggcggtcctaacggtaaggatccaaaggtagcgaagtaaatagacgtttgaaaggcgtccagtatgaaaggagaaacgagtgtagcactgtctagtcgtccaactcagcgaaacagcaataactgt

SEQ ID NO: 3249 - DNA, 161 bp, Cyanidium caldarium
  Clone ID: LIB190-064-Q1-E1-D9
cgacccacgcgtaagggcggtctctgtcgatttgtactctcctttcgctttttactaaaggagaccaggcttaggtcgcattatacagcccttgaaacaatttttgtcgtctcgttagagacgttctcctctacaataaaaactctattatttttgttttg

SEQ ID NO: 3250 - DNA, 422 bp, Cyanidium caldarium
  Clone ID: LIB190-064-Q1-E1-E1
gttatattattagtcttttggttcgttctatacttgtgaaggaaccatcttttgtttgtattgtcacggagtttatggaacgtggcactgtccgagacttgttattatccaaaagtcgtttggaatggaatattcgactgaattgggctttggatactgcgacaggaatggcatatttacattcattggaaccttgtattattcatcgagatttgaagacgaccaatcttcttgtagatcgacgctttaatgtagaaatatgtgattttggtctttcaaggttcatgtctaaagattctgtgatgagtgcagttggcactgttcaagttgcagctccagaagtttgcattcgtttgttattaattggctttttgtggataacattgatgaaaacaggtatttacacatgagcgctatactga

SEQ ID NO: 3251 - DNA, 127 bp, Cyanidium caldarium
  Clone ID: LIB190-064-Q1-E1-E2
aggctatgcgtccgcccacgcgtcggcgcacgcgtcctgcgaacgaatcatcattggctaggccagtcatttgtgtgcagttccatgtgtctgacatgaactctcccaagacagactttcgtttgag

SEQ ID NO: 3252 - DNA, 357 bp, Cyanidium caldarium
  Clone ID: LIB190-064-Q1-E1-E3
agtgaaagcaagccacagtggaataacggaggggaacatcaggagttggtggaagaagaagaagacaaagaacgaggcatcaagtcggaaacgacacattttgcacatctgaaacattttagtaatttgatttcccgggaaggaacttttcaggatctgctgaatccggttcgaaagtatctcgccttggaggaatccattcctcttcgtttattggaagtgaaggaacatttgattattcgcatcatttctccagacactgcattgcggtttcccacgtaccctcatgatcgtctggaagttcgagtggaacgaattcctagcgaagaattggaagggtgatacaagggatactgt

SEQ ID NO: 3253 - DNA, 215 bp, Cyanidium caldarium
  Clone ID: LIB190-064-Q1-E1-E4
aggccaagcatcagatggctcctccttacagtcgttgggcctggacaatcgttgcaaaaactgctctgagttgcctccatctctcattccttatcgctgccgtagttgcagccgacgtagtttcagaggagagatagggatatactcagcatcctcagtaagagcaacagtgacaactactatcttgacagtaggcatactatcaaagtccagtc

SEQ ID NO: 3254 - DNA, 322 bp, Cyanidium caldarium
  Clone ID: LIB190-064-Q1-E1-E5
ggataatgaggagagcatcgtgtagcagctctacacaaaccattacagaaacttcaagggttctcaagttagaccttaccaagaaaccagaagagaaagttcgttggactccagatacgcatgacaatgaaagagagaaccgccgaaagtctaaaatatgctgtatattccataagcgtcgaaggcccgacgactcttcgtctagtagtgactcgagtagttgtagcgatgtggaacaagacaacaataataagtcgttaccggaagagaagtgggctcttatggacaaggaaaaccaacaaagcttcctatccgaagccga

SEQ ID NO: 3255 - DNA, 315 bp, Cyanidium caldarium
  Clone ID: LIB190-064-Q1-E1-F1
agcccacgcgtccgcccacgcgtccggttggtgaaatatgacaggaagaggaaaaggtggtaaaggtcttggaaaaggaggagccaaacgtcatcctaaagtacttcgagataatattcaaggtattacgaaacctgctattcgacgtttggcaagacgtggtggtgtaaagcgtatatctggccttatctatgaggagacaaggaacgtgttgagagtgtttctggaaagtgttattcgtgacgcagtaacttacacggagcacgctcgtagagagactgtcactgcaatggacgtggtttatgctttgaaacg

SEQ ID NO: 3256 - DNA, 358 bp, Cyanidium caldarium
  Clone ID: LIB190-064-Q1-E1-F10
gaccaacgcgtacggtacgacaaagccaagtgaggaaccgaatgcaggtacagggcggcccgatagacagttgtgaaagagtgggagaacatgagcgcacagaagaatgtacgaaatggttagagtaatggccatagtggaagtcatagcgggaatctgagaggaagacagccacgttggaactgagaaaaggtccaaacaagagacgtcagcagtggggaaaattgggcagtggtacagggaagtatgacccaatattgaagactggagtaaacagtagaggaagtaaaaggagggaatgaagggaagttatggcagaaacacgtgccagcagcagcggtaaaacctgtgtagcaag

SEQ ID NO: 3257 - DNA, 385 bp, Cyanidium caldarium
  Clone ID: LIB190-064-Q1-E1-F11
cgtcgcaacccgtcttagtgctttgcgacttccaaaatgatattatgggtttcgttccccctgagaagaaggaagccgtcattaaaggagcttcgaaacttttgaactttgcccgtgagaagaagatccctgtagttcatgtgggagtacgttttagaccgggacaccctgaagtttcgaaacgaaacaagatgttttctcttgtttcctccagaggcccccatccttgtggaaggtactcctggaagtgaccacgtagcagagttgaaaccaattgaaggtgaattcagtgttacaaaaagaagagttggagcacattataataccgatcttacaaccattcttagcgctttgggcgctacccacctgattttgggaagtgttt

SEQ ID NO: 3258 - DNA, 327 bp, Cyanidium caldarium
  Clone ID: LIB190-064-Q1-E1-F2
ctcagatactactatccgaccacaggatgacgaagtagttgcaatgataaaagagttgttggagacaagaattaagcctgcagttgcagaggatggaggaaatatattgtatagaggatttcatccagatacgggtattgtcgatttggagttgcaaggctcttgtactacttgtagttcgagtgtagtaacgttgaaaagcggagtagagaatatgcttatgcactatattccagaagtcaagggtgtgagagaagttgtaagtgaagagagagaaaggatggaacgagtaagtagagagcagctgcaaagtttggaacaaagact

SEQ ID NO: 3259 - DNA, 328 bp, Cyanidium caldarium
  Clone ID: LIB190-064-Q1-E1-F3
agcccacgcgtccggtgaaagtgacagcgacgagagttgtgccagtgacgacaagacgatgaaaccttgcaccaagagacttgcttctagaacaaaagtgatgaagtgttcgaattgcggttcccatactttgtttcctgtggacgatgaagaagagtggagcaatggcgcgctgcaggattcgacggatagcgatattagtacttatatgcctctcaagttttggaagatactgaatagtggtgaaggtcgagatagcgagaaattgtttaggtttaaacgaactcaaggaaattgtgtcggaggcactgtccaataagactcgcca

SEQ ID NO: 3260 - DNA, 333 bp, Cyanidium caldarium
  unsure at all n locations
  Clone ID: LIB190-064-Q1-E1-F4
acgcgtcagctaattgtanaagaatggaaactttcgagtgttttgacagaaggcgaatatcgtctgtttcagtggatagtttttcttggaggttctttttatggtggttgggtgctttagtctgagcataagaatagtgcactttatgcggccaaggaagaagcttttattgctcaagaaaggaacaaagaaaggcccatgagtgaagaatactggagagaattgcaagaaataaaacctagaaatttggaacagttgtacaagatgaagcaagaagacgctgcaaatagatcagaaaaatatcaaaggtggaaggaaaacctacttggttta

SEQ ID NO: 3261 - DNA, 324 bp, Cyanidium caldarium
  Clone ID: LIB190-064-Q1-E1-F5
agcgcatttttacgcattgttggttgaaacgatatggcagagaagttgacagagatcaaggataaagttgccgataaaataagtgaaatgactggaaacaagtcatctcaggaccaggcgaaggataaagctagcgaggcaggggaccgtatgaaggatgcaggaagtgctatgaaggaaagtgctcaaaatgcaggggacgccgtcaaggataagatgtccagcatgaaggagtctgtttccaacaaatcggaaggtgtgaaagaaggtctgcaaaagtagatactccgaggttatctcatttgtttcgtcttgtttgtgttt

SEQ ID NO: 3262 - DNA, 345 bp, Cyanidium caldarium
  Clone ID: LIB190-064-Q1-E1-F6
acgcggacgcgtgggtttgtggttgctgttggtgatcgacacgaaagatattatcgtgaaccaaattcatttatatatcattggagaatgactcccaaaaaggaaacaccgcatactcccaaaggaggctatgcaaaagctgtacttgatagcattgttgctctgaaggagaggaatgggtcctctccacaggccatcataaaatatgtcaaggctcacaatccgcagcttccggaagacaaacttaaacttcaactaaagttagctttgcgtcgtttgttaaagcagaagcttattgagaaggtgaaagcttcgtataagattgctagcaagagtagtagagtt

SEQ ID NO: 3263 - DNA, 320 bp, Cyanidium caldarium
  Clone ID: LIB190-064-Q1-E1-F7
gttggttcgacgaccacagtgtgcagttggcagtcgatatatttcgagtagacagaaccgtgtgagtattttgaccaggcggaagagggaaaacttggggaggtatagacacctggggacaacgactggttgtttgtctgacgtgccaaagaataatgttggttatgaaggagatggttcagagtctagggagaatgtatcacaaaaaagggatagaaggaaaatagcgtcaagtgaagaagaattggcagctctacagactttgtctttagagggcttgttgagttattacgagggaactcccatgttttcggaggaag

SEQ ID NO: 3264 - DNA, 423 bp, Cyanidium caldarium
  Clone ID: LIB190-064-Q1-E1-F8
gacccaaacgtaagcccacgcgtccgcccacgcgtccgcatcggaatgctgtcgctatttgttggaaactggtttaacagcaatacaggaagaattggaatgggaaaaaaacattgcatagctaaaggtatcctctctctctctctctctcataggacgagtgatatgagaatatatacaatatatatatttgttggtagaaatgttcaacttgatgtttttcctcgcaatagagaacaacaaacaaggggcacaaacaaggtttccattgcaagatgtgtttgcagtatttgtctctcgcgggtgaaatgattagttgttgtcgtcttctcttcctatgatttgagagtgatgatgatgattgttacgtgttgttgtttggtgaaggagtaataaatgtagcttttgtgatttgcatggatg

SEQ ID NO: 3265 - DNA, 384 bp, Cyanidium caldarium
  Clone ID: LIB190-064-Q1-E1-G10
gacccacgcgtacgcccacgcgtccgggaaaagtcgacgtgaagtggaggaaattttgtgtttaatggaatctgatggaatagagccggatagagttacttataacaccttgataaaggcatatggctacatgcgtcggcatgatctcgcagaagctacctttaagcaacagatttccaagtttggaccgcagttggttggctttaataccctaatgaatggatactgtgaagactaaaaagtttgctcgtgtcttggaactatttgcgcaactcaaggaattgggtttgaaaccagatgttaaaacgtattctactattatcaatggacaaatattgtctggtgagaattcatctacagtcatgtgttggtatcgacagatga

SEQ ID NO: 3266 - DNA, 380 bp, Cyanidium caldarium
  Clone ID: LIB190-064-Q1-E1-G12
gacccacgcgtacgcggacgcgtgggtccacataatgatatgaccaccttagaaaagttgctggcagaaacagtttcgaatgatcccatttcgggtaaagtgacacaaaggagatttatcatcgtggaaggaatatcaagcaagtttgcggatgtgacacctttggataaagttgtggaattgaagaatcagtaacgttttcgattgaatgtgggacaaagttattcgttgggtggtcacaaggaaaacaggtcgtggaaccttagaacattttggatttggaaacaaagatgcagatattgttttggcagatctgggaaatgctattgcaactgtgggtggattctgctgtagtagtgaagaagtagccaatcatcaac

SEQ ID NO: 3267 - DNA, 362 bp, Cyanidium caldarium
  Clone ID: LIB190-064-Q1-E1-G3
agcccacgcgtccgcgaggagagagagagagacagacagatggccaacgctggtcaagatggccttgtgcaagtcaacaaacatagaaaagtaaacagattgcaagaagataatattttgaatagagcactatcacaaccaggaggtaaagtacagaaaactatccagttatccattcatagagtctattagatgtatttctgtgcttttgcaacatccagttgttggtgaatgcagaaagagctattataggaaatatgtacgtgtccagaaagtatcgaagtgtgtcgtctattagctggacatatagcagtttggttcgatgaacatttgggtgactttcggttgggagcgatcttggg

SEQ ID NO: 3268 - DNA, 367 bp, Cyanidium caldarium
  Clone ID: LIB190-064-Q1-E1-G4
ccacgcgtcagcccacgcgtccgagtgaaaggacgcacgccatgtcgaggagcaatacgttgcaacaactagtcgacttttgtacacgcaatactttggtggataagaacaaccaaacaggaacttgtatctggaacgaattatctaaatgtgatatattatccagggaagatcctctttttggttccgtggactcacgcgcagtacagtactggtttgaacaagcttggaaccaagacaagagtcaacttttagaatctgtcaacaaacacttgtctaataagacttagttggttggagaacgacttactattgccgatatagcagtgtacactggcctctattccactgtccaacaaatgttgtc

SEQ ID NO: 3269 - DNA, 316 bp, Cyanidium caldarium
  Clone ID: LIB190-064-Q1-E1-G5
aacatgaggaagaaagacgcaaatacgggaaagcagtaaaagaagaaagagaaaggaaaaaactgagtatcacgaagaaaagagggagtcgatgacgaaagaaagatcaaggaagtaagagtacgagaaggagtactgtgaatgaaagcaggaaagtatttgaagaagagagtgtaaagcgcgtaccttgtgcacaatgtcccagcgagtgaaagacgaagcaaacagacagaataagaagtagccaggtaagacccgaagctagttgatcttatgccgtccaagcgaagtaacgctgaaccagtatctgtggaaa

SEQ ID NO: 3270 - DNA, 379 bp, Cyanidium caldarium
  unsure at all n locations
  Clone ID: LIB190-064-Q1-E1-G9
cccacgcgtccgagaattttggggttgaggaacagtgcaagttgggatggaaacgcctaactgtagttcacgattgatactgctgttttgtttggtctttataacgactataactttggtaaatgcaaaacgaaactattataaagtgctgggcgtggaaaagaacgcttccgagagtatgtggtttagcgttcattctccaagtttctttgacttttgnttaggagaaattaagcgcgcgtaccatcaactagcaaggaagtatcacccggacaagaacggcggtgacaagaaggcggaactgaaatttcgagaaatagctgaagcatatgaagtcctatcagacccacaaaaaagagaaacgtacgacttgtatggc

SEQ ID NO: 3271 - DNA, 328 bp, Cyanidium caldarium
  Clone ID: LIB190-064-Q1-E1-H1
agcccacgcgtccgtgtttcgtcagagatggacgccgcttccacaaaggaggaaagaacgtgcggtatacatataaagtgggagcaagtgtttgacccagggaccatgaaaattgacggaaaattcgccaacgtttggttggaaggtttgcccaatctcttcgctgagtgttcgagaattgaagtttcggagctccttggagaaagagtcaaggtcggaaacgaagaattttttacatgggccgaatcactgagggccgcctcttcaattttgtatcccaagaattttgctgaagactttcctttgaagcgttccggcaatgaaattt

SEQ ID NO: 3272 - DNA, 349 bp, Cyanidium caldarium
  Clone ID: LIB190-064-Q1-E1-H11
agacagaagttttgggagaaaggtattatggaaaggtgtataaagctcaagatattagaacaaacgaaattgttgcactgaaaaagacccttttggtaaacgaagacgaacgcgtccccgcaactactctgagagaagtttctatcttaagagcactttcagattgtccctaaaatcgtaaaactatctgacgttcttcacactgcatccagaaatggtaaacctgtattgtacttggtacttgaatacttgggacacgatctcaagcactatatgatttcgaagaacggcagaggagtatgactcgataagaaacaagctctggtgtgtttgctgaaaataaattttc

SEQ ID NO: 3273 - DNA, 383 bp, Cyanidium caldarium
  Clone ID: LIB190-064-Q1-E1-H12
gaccacgcgtacggacgaagaggatgaagacgaagacgaagacgagcaggatgaagatgaggaggaggaagacgatgaggaagaagaagatttaccccagtctaagagaaagcgatctaaagactcaaaaaaggaagtgtccaaagcatcagcaaaaggtcatggaggcggaggtcttcgtgctgcagccaacaaaagacgtcgttctggtgaagagtcgagtgatgatgatgatgatgaaatgagcgaatccttgaaagacactcgactgtctgattaaagggcacaccgcaatcttacaaaagttgtgtaaggaaaaagagcagtgcggccaatatgaatttgttttcagcttcttttatatataaaagcattggctcgca

SEQ ID NO: 3274 - DNA, 409 bp, Cyanidium caldarium
  Clone ID: LIB190-064-Q1-E1-H2
agcccacgcgtccgctagtctccccggatagttgtgaatattccattggactggcatttttccgttttgaagcttgatttagttgcgtcgctttgtttgccactttgtagtaaataaagaaaagactcaggagatatctttgataaagtatggggaacagttcctcttctagtgcgtgggaccttgcatcgaatggcacactgggaccatattacatgaaccacagtgttcccaggagtgaccgtttgctctatatgacgaatatgttttcgcgctcttcaagtaatagaagaccgcgaaacagcagggccagaagcagacatagtactgaagaaccagggataattccaactcaattttatctggatgagagcacgtttctaaacttgatacagaatagaatagttgc

SEQ ID NO: 3275 - DNA, 348 bp, Cyanidium caldarium
  Clone ID: LIB190-064-Q1-E1-H4
cggctcggcccacgcgtcagcccacgcgtccggaaacaaacctcccaaagtcagagaaaccagtacagtagcagttgatgatttgaagccttggaagagagaagacgacgatgatccaactttatcagaaataggtcaaaagaatttgcagcagcagcaacagaatgctgtaaataatatgaataatagaaaggataacaagaacaagacagtagatatgaccaaagagttttttagggagcctccaagacgtggaagaggaggaaatagtcgcggtattggggggaataggagaagaggaagaggaaaaaccggtcctccaaatacttccaataataactatcgacg

SEQ ID NO: 3276 - DNA, 139 bp, Cyanidium caldarium
  Clone ID: LIB190-064-Q1-E1-H6
atattctattggactggcatttttctgttttgaagcttgatttaattgcgtcgctttgtctcgcactttgtagtagataccgaggcgagccacgagtatatctttgagaaagtatggggaacagttcctcttctactgc

SEQ ID NO: 3277 - DNA, 398 bp, Cyanidium caldarium
  Clone ID: LIB190-064-Q1-E1-H9
gacccacgcgtaagaaaaaatgttcgtgtcttactccgtacctgcaagaaacttaccggctttggcacgtaacttttccaatgtctgtctctcgaggagtggtctgagagggggatgtttacgaaatgtgaaagttttcaaccacaaacgacctgcaaggttgttatctacgaaaatgagaggaggcgaccatgaaaggagagaacttagtcgtcctatgcgtacgcttgatttaccgctttcgacgaacttttagcttttgcgcaggatccctggtccatgtttcgctctccatggagtctgtcgcccagaagtatggcagtagacacgtggatgcctcgtgttgacttggtggagaaggaagatggcttttatgcatacgtggaactaccaggact

SEQ ID NO: 3278 - DNA, 269 bp, Cyanidium caldarium
  Clone ID: LIB190-065-Q1-E1-A1
gcgtccgcccacgcgtccgcccacgcgtccgcgaagaaagaaacggatgacgtggacagcgatagtgacatagactcggagtggagtgacttggaagataatgagaccagttgtcccgagcaagttggtgcggttgctggttcttctgtcgtgaaaagcggcatttttgtgtagagagtgtgtacagaggtttcataccagccgtgttcaattgtggtgtgttggtgtacataaccatctacgttttggggctgtgttgggcctacttt

SEQ ID NO: 3279 - DNA, 378 bp, Cyanidium caldarium
  Clone ID: LIB190-065-Q1-E1-A10
agcccaagcgtccgcggacgcgtgggcacaacttggggcgatgacaacaacgagcaacaacgctttgtcatcttcttcttcctccaaagaaacgcatatccttgtagaaacaaatccttctcaaacagagtggagaatatggaaagctcaaaagaaactcctagtagcctccattctttgtgcgttgtttatgtttgctgaaatattgggaggatacttggccggttctttagctattatgacggatgctgcacatttactttccgactttgcaagttttgttatatctctggttgccttacaccttgcgaaacgtcctggaagtactactatgagctttggttatgctcgagctgaagttattggtgcatttgtgag

SEQ ID NO: 3280 - DNA, 313 bp, Cyanidium caldarium
  Clone ID: LIB190-065-Q1-E1-A11
gcacgcgtcagcccaagcgtccgcggacgcgtgggtttggttgttttcttggtagcagttgtacattcaacatcatcaaatgccaaagggaggaaagaaagattcttcaaagaaagaagccacaagtaaacctgcagcagcagatgctacaaagacgacagaaaagtctggtccggaagccaagttgaagggaactggtgcaaagaaacaataaaaagttgactatgcatgttcctgttatgttttgtgagttctgtttgatagtttccagctattcttttggtagtgaataaagagaaaattttttatattt

SEQ ID NO: 3281 - DNA, 370 bp, Cyanidium caldarium
  Clone ID: LIB190-065-Q1-E1-A12
agcggacgcgtgggcggacgcgtgggcgacaaagtaattctgagatgaatgatgatgtttaccattttaatgaagaagaagaagatgaacaagctgaaagagctagaagtagtcttcgacgttcttctcaacctattgacgattctgacaattttaactcgtcggaagatattattccagaagatgatccacgtatgacagatgaaattggtgaagaaagggatcgaatgtttgatgatgccgacaaagaaaatactcttctttctaatgacatgatgaatcttgtcaaggacgcaattgacaaggcaacttcagaaaagatgagtgaacaatgttcccttcgagaagttatgaatgtgttggacaaaca

SEQ ID NO: 3282 - DNA, 111 bp, Cyanidium caldarium
  Clone ID: LIB190-065-Q1-E1-A3
ctcagtcttccgttgttaacacagagccacggtgatgtcaaggggacaaaagacagttcttgaaaggacgatcatctacgagaaacccgacttactccaacatcgttcatt

SEQ ID NO: 3283 - DNA, 324 bp, Cyanidium caldarium
  Clone ID: LIB190-065-Q1-E1-A4
agcccacgcgtccgttttttctcttacaaatgtggaggaggatgacgactgtgagcactcgtgtcatcaagtacaactggaaagccctgtcttgtattggaaagcagcaacaacaaccaacacaagccttttctagtgtgcaaaaatttcaggaagagtggttaaagtttctagtatgtcctgtttccaaacaaactttgtactatgactcggaacgcgatgaattattcaaccaatcgataagatatccagtaagtacaagtcatataaaatgctttattttctatcattgaaaaacaagtatctcctccttgaagcaaacaa

SEQ ID NO: 3284 - DNA, 417 bp, Cyanidium caldarium
  unsure at all n locations
  Clone ID: LIB190-065-Q1-E1-A6
gctaagaatcttgaagaatggaacgaaataaaaatcattcagactcgagttttcaccatgaaagaacagaaacaactgaagagtcgacgtcagtcccgacggaaccttgtatgggagagttgcagcaacttctttcagtgacacttgaaagaagccatttggacataaggaagcttcaacaagcagcgaacgattttcgtttatgcgcaaagacgtttaaaatatgtgatgtgaagttggaacaaagttttctcaaaaagtcaagtgattagacaccctcatggtttttcattgaaataactggttgctcttccttgaggcaacctatttattacgaaaatttcgtgcaccttctcttacaatatgagggttccttctggatatggtgagttttcattganagttttgttgggtgcc

SEQ ID NO: 3285 - DNA, 213 bp, Cyanidium caldarium
  Clone ID: LIB190-065-Q1-E1-A7
ataaaaaaaaaaaaaaaaaaaaaaaaaaaaaaagaaaaaaaaaaggaagaaaaacaaaaaagataaaagattaaataaacgtgaaagcacagctaaaaactcggggagggtgcccttgaaggttcaattcattggtccgtcgctttacaaggtcggccctgttcaaaggcggccgttacttacctttcacggccgggcgtttacccccctttc

SEQ ID NO: 3286 - DNA, 391 bp, Cyanidium caldarium
  Clone ID: LIB190-065-Q1-E1-A9
agcactcatttgtgtgcagttcgaagtgtggcaaatgagctctcccaagacagacgttaataagagcagtgacgaaggagtgaatttgggtccacttgcagtaacaagtggccacgaaacgagagatttgaagggaactacgtctgcaagggcccgaagaatgagtatggaagagagaaatcttgttcttttaaagaggaagctaagaaacagagcgtctgctgttcgttccagaaaacgccgcttggaaataattgagacgttgtacaatcaagtgatcgaactatctcacttggcttcacgactggaggagcgacttcgagtgttagagagacatggacttactactttgcaagacagttgcgtgaacctatcgaataagaaaacctta

SEQ ID NO: 3287 - DNA, 386 bp, Cyanidium caldarium
  Clone ID: LIB190-065-Q1-E1-B1
atcaaactacattgcgatgtgggatgcgttttcaataaatgttgaggaattactatccgaaatttggtagcttccttcaatatatcatcacaccctattcctcgacaactccaacataagcttctacaagtcacaaaaaggttctttccacgggtgcagaagaattcggcttctgtaagtgcaagggtgcttatttccatggatataaaagataaataacttatgcaaataacgccctactattttacaagactgaaaatcgtggtagcgggtatcgactgactaaggtttgatacacgactattgggcttgcgtaacgtttgctgagcttcacaaaaatcgactagttccatactactgtctggtacttttgtgcttctccaaac

SEQ ID NO: 3288 - DNA, 400 bp, Cyanidium caldarium
  unsure at all n locations
  Clone ID: LIB190-065-Q1-E1-B11
acgcgtcagcccaagcgtccgcccacgcgtccgcagaagagaagctttccgaggagaattttgtctgcaatagtatgaagcaagtcgtgactgacacaatagacttgctagaaagagtagagcagagatgcatagaatgggacaaaaagacagaaaagctttcaggaggagtgaaacaagaatatttgtcgtttttggcgccttttgtgtatcagcgttttctcgtgtgtttgtttacttggaacgctctgttgattgaatgttttcattctaatttctttgtagtcgaaaccattcgagggtttgttacactgactgttggtgcccctgttttagctcttgccgctagtctttcgtttgcgcattattatcgacgcanaagtatgccgatttttgcaaa

SEQ ID NO: 3289 - DNA, 397 bp, Cyanidium caldarium
  unsure at all n locations
  Clone ID: LIB190-065-Q1-E1-B4
gtggaaagattctgtcgtgtatccaatgtggagagcaagggctgtgtgctttattccagaaaacattcccagactctgaaattcgcatttttccaagtaaagccctgtccatgactgcggtctttctctttctctctctttcgagagatgttgcagaaatactccaactgaaatgttttcaaaggcggtgcatgttttcaccaacgttttcccatttggagcttccaagcccgccatttcttctacgcacccttttcttaccccattttgtgtctcttactcaccaaggcatggcgggtttagaagacttttatgacccgacttgtggtgcagaatatcanaatatagtgccagaaaaaaaggaacctgtagaaaacaaaccagattctactcgaaa

SEQ ID NO: 3290 - DNA, 401 bp, Cyanidium caldarium
  Clone ID: LIB190-065-Q1-E1-B6
cccacgcgtccgcccacgcgtccggcctggttgaagagtattactcgattacctattcttgtgaaaggagttgttactagagcggatgcagaaattgcagttcgtaatggagtagctggtattattgtgagcaatcatggagcaagacagttggatacttctcttgccactattgattgtttggaagaagtagttgcaggtgcacaaggcaaagttcctgtgtttgtagactctggagtacgtcgtggtacagatatagtgaaaagtttggcacttggtgctcaagctgtacaaattggtcgtggtgtcttgtggggtttagcagttggtggggaagaacgtgtggatctagtgttgaagttgcttcgtgatgagtctgagttgggactgggaacttgtgg

SEQ ID NO: 3291 - DNA, 416 bp, Cyanidium caldarium
  unsure at all n locations
  Clone ID: LIB190-065-Q1-E1-B8
cggacgcgtccgcccacgcgtccgcccacgcgtccgcggacgcgtgggcaataactgacgaaaagaagaatgttgcgttggtggagaaggagcgactgactgctgacgaaagaatattagacattgtgcgtgactaggaaaacattatggaaagtgctagtcaattgtatccagaaaatcctaagaaaaatattctcctggttggcactccaggaacaggaaagacaactcttgcaaagagaattgctgctgtcacttccttgacacacttggaagttggaaagtttgctgaagagcacaactgtttgggctgttacgacgagcagttagattgcttcgaaatagaggaggagaaacttattcctttgctggtaaacgctctganacctggaggctttcttgtggagtatcatgga

SEQ ID NO: 3292 - DNA, 190 bp, Cyanidium caldarium
  Clone ID: LIB190-065-Q1-E1-C1
ctgcatcagacaccgagcggtgttgggtgttgtttgtggagacaacacacttgacataacactgtataataatgtatgtgtttgtagcagtcagcgtgttgataacgatcaactattctttgcatatgtttcaacatgtgctgcaaaatgccgtaattaagatcaccggatcaacgaacccccctatggc

SEQ ID NO: 3293 - DNA, 410 bp, Cyanidium caldarium
  Clone ID: LIB190-065-Q1-E1-C10
ggtcaggaataacgggtcggccacgcgtcagcggacgcgtgggcgagaacgatgcttatcttatggtagatatggcacatatttcaggtttagttgcagcaaaacaagttttatcgccgttttcttatgcggatgtggttacaacgacaacacataagagtttacgtggaccaagagcaggtatgatattctatcgacgtcaatgtcttgcacaagttagacgaggagaagatttggagtcgttgattaattctgcagtacttcctgctttacaaggaggacctcataatcatcagattgcagcacttgcagttcaacttgcacaagtaaatacacctgaattcagagaatatgcgaaacagatcatattaaatgccacagctttggcgaagtacttgagttcgttgggt

SEQ ID NO: 3294 - DNA, 380 bp, Cyanidium caldarium
  Clone ID: LIB190-065-Q1-E1-C11
agcccacgcgtccgagcatatgaactgggttgcaatttatttgataacgctgaaacttatgcagctggagcagcagagtctatcatgggggaggcttttcatcgaggtgtaaaggagggcgtatggacaagagaagacttggtgttgactacgaaaatattcttcggcggaagaggttcacgggactgcaagcctcgttgaagcgtatgcagttggatcatgtagatgttgtgttttgccatcgcccagatccacttacgcccatcgaagaaacagttcgtgcaatgaatcacgttattgaccgagggtatgctttttactggggaactagtgagtggtctgcacaagaaattacagaagcttgtcgagttgccgatgtc

SEQ ID NO: 3295 - DNA, 409 bp, Cyanidium caldarium
  Clone ID: LIB190-065-Q1-E1-C6
agtttggacgaattattgcgcaatcgatacgctccaaatgtcacgagggtttgggctgtactcaattatgacgaggtccaggtaactcactcatctgacggagtccctagagatatcatagaaagtgaaatagtacgtattccagccgctcaaaggcctgcagatcttttctttttgagagaaaattcgttgttcaagttttggcatcgtgagttgatgtctcaagttattcatcatgcacagaaacgtcgtcgcctcatcatggccgagcatacgaaagataccgcgaaacaaccattttgctcgtgtatgtagtagttttgctttgttttgtgtagtagttagttgtgtttcagcggaaagggcacgttttcttctcattatggacatgagaacatagatgttttgt

SEQ ID NO: 3296 - DNA, 411 bp, Cyanidium caldarium
  Clone ID: LIB190-065-Q1-E1-C8
cccacgcgtccgcccacgcgtccgagtaagtgcgcttggcagcaaactaaaagatggcaagaagaatcatcggagcttatatgtctgacgctactgtagcgtctctatttagcgtgaaaatgttgttctaccttacaatacttgcgttctctatcactattgtgggtcttatgggtaagagttccgacggtatttgggttcacagtgttccagcgaaagacgaatattgtgcatacaagtcttcccttcaagtaaaccaccacggcatagcttcctattgcaagtatatcatggctgtagcagctattggtttggttatcagcttcttcgagttttggtatgcattcctcggaattttcttcaagtggcaacaaaagttgtggtatattgaatctgctatcaacgtgtttt

SEQ ID NO: 3297 - DNA, 375 bp, Cyanidium caldarium
  Clone ID: LIB190-065-Q1-E1-D12
agcggacgcgtgggtctcgaagcaaaaagccttgaattgcttctcttttctcgaggttaatatacagttgttgagtaaatttaccgttgtgtcttatgattttcacattacgctgtagttttattaaagttattgtcaagagattatgaagctcaatgacgaaaaaaaaaatagtttgttgacacgttttctccgagcgaatttttttttgagtgaggattacaagttgaagtagttgtggttgtctcaagcttttgcgcgtttcttggtatagaaaaaccgtccattcttatcttgtttcctagaaaaaggttcacagcgttgtgagtatcattttcaagcgacgcattgttgttttggaaccaaaagttattg

SEQ ID NO: 3298 - DNA, 289 bp, Cyanidium caldarium
  Clone ID: LIB190-065-Q1-E1-D5
acgcaacgcgtccgcccacgcgtccgattacgtggacgtggcagcaacatattttacggcaatatgaatcaactaagccaagtggtctcacacgtaggtaccgtgcagaagaaacccaagaaatatcatacaacacatggatgatctttccaacctgacgaaaatggtggatgtcatagctaatgtatggccaatcagctatttcgagttacacctaagttctggacgcatcaatgacaatgctcaatgtcgcatattagattcctggaattaggcatcacttctaatt

SEQ ID NO: 3299 - DNA, 383 bp, Cyanidium caldarium
  Clone ID: LIB190-065-Q1-E1-D6
aggggcaaccaactaccaccaaaagtagcaactgcaaggaagaacagagtgtcctaaagaatagcaagttgtgatgaggagaattggtagcaaactcttgtcttattccggcaatgaagtaaaacttcgggatgttgtttcttctctaagggagacgagtaaagcgacggggtcttccatccggagttggcttcgtgatatcaaccagtggtatgaagacacttactataaaaagggaaaggtggatcctttggtacattatatgttactttgttttggagtgggatataccatcaattactcccatatcaaacataaagtggagcataagaatgacgatatcgaaagcttgtaaacgtcacctttgttgtgttgttggtgat

SEQ ID NO: 3300 - DNA, 394 bp, Cyanidium caldarium
  Clone ID: LIB190-065-Q1-E1-D7
agcatgttccctttcagctgagtgtactgcattccatagagcaactccactttgcaaatgcttcgagtcgtcctcttccgtttcagactttgcattcgtcccgtcctgttgcaatctttcgcgaaccatcgataatatagaatcccgggttcgtttctctaacttttccaacttcttttccaccttcttcttcaaatccaagttactcacttgcggtataaggagactctaaaaaacgagattagatatgaacgacgaacgataacctatacttacgacattttcttttctttttctttcaaattccttgatttcttcttggaaaatctcgttttgctctttagtcactttcgttactatttcctcagggtcgacaaactttcgtaaaactaag

SEQ ID NO: 3301 - DNA, 361 bp, Cyanidium caldarium
  unsure at all n locations
  Clone ID: LIB190-065-Q1-E1-D8
gaaagtactttggtaagagattgcaataggtcttgcgaccagataagtaagcgtgtgtgcatgagtgaaaagacatccgagcacgaagagaatgtaggtaaataggataggactcgaaatcacagtgtaacgagagtannaggacgcagagatctagaaagagagaatgcctgaggtgtgagtactcgagaacaaggtccagggaagtagaaggtaacaatgaggaaaagtttacaatataaagggatatatggaacagagtgtaaggctgcgtcatactagaaatccgataggagtagagaatgagagaaagttgtgggaaaagaacataacagcagtactgaggaccgactcaggtact

SEQ ID NO: 3302 - DNA, 197 bp, Cyanidium caldarium
  Clone ID: LIB190-065-Q1-E1-D9
cacgcgtcagcccacgcgtccgcggacgcgtgggctcatgggaaggttgcatggcaccttcaatttggtggtttgaaaataactacgaaatagtattcagcgcaagtttttacgatacaagaataaacattatgtgttatacttaaaaaaaaaaaaaaaaaaaaaaagaaaaaaaaaaaatgacgataacacaaaaa

SEQ ID NO: 3303 - DNA, 355 bp, Cyanidium caldarium
  unsure at all n locations
  Clone ID: LIB190-065-Q1-E1-E12
agggtaaacatgtggaaaagagcaactgtcccaacactaggaagaatatattaccctaagcggttggtagaaacttttgccaagaaagaaacaaccaagttgccagttgttcacaactttgtgggaggaaaatttgtggcaagtcagggccctattagccagacagtgaccaatcctgccactggagaaagccttcaaagcgtaccttccactaccaaacaagaagtggaccatgtagtgcaagtagcccaagaagcgtttgaaagctggtccaaaatgcctatgggaaggcgtttgaattacatttttcagttgcgatagggagtcangaaaagatccgcggaaattgcccaag

SEQ ID NO: 3304 - DNA, 419 bp, Cyanidium caldarium
  Clone ID: LIB190-065-Q1-E1-E6
ggagaaaaagacgaagactgttggtggctcgatgagtacaacatttctttgtccattcctacccaaactcaactattggaaaccactttgtaataaaagtaagtatgggagaatgacagtggacaaggaaaggaaagaacctacctcctcctacccagcagagtgggaacagcatcgtatcgtccagtccaacttgtttcgtcaacaagtagaaacctttttgcgtcctattccaaaggatgtgcaacaaagaatggaacgaattgcggaagccttgttattacaacctcaagacacgttgatagatgtgggttgtggaacaggagccatggtaccttttattcacaagtatattcctttatctcacatttggttgtgtgactgcagtgaagccatgtcagaacaagccaagaaaaggt

SEQ ID NO: 3305 - DNA, 416 bp, Cyanidium caldarium
  Clone ID: LIB190-065-Q1-E1-E7
acggatggaaactctggaacagactcctagtcttcaagcagcaaacaggatcaaccaactgctagaaactcaaacaaaaacgatagaaaaacaaaagaaaaagatacaatatgaagtttggaacggtgctgagtggaccaacaacagcaatctagaaaaaatagcatgcgtcttgacagagtgtgaaactcttttgaaagatatgcaagcgtttcgtcgatgtatttattcacaaattcaaaaccaccagacggaaacatgtttcattcctacacagtttttcgaagcttggtctgctttgatgaaggaattggaggaatgtcatctgccgcctttgctcgaacatttggtgacgtatgacatgtccaaacaaccattcgatgaaactctacagagactcgaacgttgtgtatcct

SEQ ID NO: 3306 - DNA, 408 bp, Cyanidium caldarium
  Clone ID: LIB190-065-Q1-E1-F1
agaattgcttcagcttgaagatgaactccaacactacccctaatccaatggaaatagagtcactagagactaaccaagaaagagaaaccaacgccccagaagtatgggaagaagaagaagaggatgaggcaaccaagaaagatgatggttcgacaaggtttctcaaggtatttgcggtcatagctggttggggctccactttcttcggagtagatacttcagttattggaggtgcagctctgtatgttcaacctgacttgagcatttctcctttgcagtggtcatggattacttctgttccacttttggcagcatgctttggtttaggaacctccatacccctttgttaccacattgggagaaagtatgttgtccttttagctgctgttctatatcgggctggtgcta

SEQ ID NO: 3307 - DNA, 205 bp, Cyanidium caldarium
  Clone ID: LIB190-065-Q1-E1-F10
catcccgctgggacatttggcgttttctagcgacgctggctatctattcttcggtgcacactacattcaccaagtaccttccatagaccatctcactggggtgggtttactggtacattgtgtacttgtgggtagttgtgtgccttttgtggttgtcaccctatggttgactccacgcacggtcatccacattcgtcaacatgtg

SEQ ID NO: 3308 - DNA, 415 bp, Cyanidium caldarium
  Clone ID: LIB190-065-Q1-E1-F3
agcaagcgtagagcagaagaactgggtgtaaaggtcgagtagtagagtaagtgtaaaagggaaaggaaaggagagaaagaggaaagggatgaaatgcagagatctctagagaaaggcaagaaagaaaagaaaggaagacacagtaaatgaggcgagaaagcataggaagtgaaacggattaggaacccgtgtagtctatgcagtaaaagaaagaatgagtaagaaaaaagggagtcattccaccaggggagtaaaggcgcaagaaagaaacccaaagcaattgacgggaatcggaaaaaggggtggatcacgtaaattaatccgatataaaccgagaaccttacctctccaagaaggtgttgcacggctgtcgaaagaacgtgctgtgaagtgagagaacgtacgagaaagccaa

SEQ ID NO: 3309 - DNA, 406 bp, Cyanidium caldarium
  unsure at all n locations
  Clone ID: LIB190-065-Q1-E1-F7
aggtccaaacaagagaagtcagcagtggggaaaattgggcaatgtacaaggaagtatgacccagtaatgangagtggagtaaacagaaaaggaagtaaaaggagggaatgaanggaagttatggcaaaaacacgtgccagcagcagcggtaaaacgtgtgtagcaagcgtagagcagaagaactgggtgtaaaggtcgagtagtagagtaagtgtaaaagggaaaggaaaggagagaaagaggaaagggatgaaatgcagagatctctagagaaaggcaagaaagaaaagaaaggaagacacagtaaatgaggcgagaaagcatangaagtgaaacggattaagaacccgtgtagtctatgcagtaaaagaaagaatgagtaagaaaaaagggagtcattccacca

SEQ ID NO: 3310 - DNA, 336 bp, Cyanidium caldarium
  Clone ID: LIB190-065-Q1-E1-F8
cttagaagcagcaaaccagagaggaaagcgttaaagcatgaaagaaaagaaatccgaaaaagaagagaaaaaggtaagaaagaggaccgaatcagggtaagaggtagaggagcaagaagagaagagagaatgctgggtggagtagcgaaacaagagaagggaagtaaaaggtaagaaagaggaaaggtttacgagagaaggaagtagaaagaagagagtgtaaggcggcgtcataatagaaatccgaaaggagtagaagaaaagagagagaagaaagaaaagaagagaaaagccgtactgaagaccgacacaggtactcgaggagaaaggagaccc

SEQ ID NO: 3311 - DNA, 394 bp, Cyanidium caldarium
  Clone ID: LIB190-065-Q1-E1-G12
gggtcggccacgcgtcagaccattgtcatatatgaatgatcaaagtttcttaactggaccacttccaaaagatattcatagtattgcctattctcgtctcattttacagcgcttggaagcgaaactggttgctaatttggcaaaggaaatcgaaaagcgtagtaaacaaggcaaatcctcgtttgaagtttggaacgaatgtttagacttggctgccgaagttggaagagcacatacggagttgctaatagcagaactttcggaacagttgatacaacgagctagtgctaccgattcttctgtcggaaacattttgaaacagtgtcaaacgctgtttcttttacatttgattgacaaacagtcgattttcttgcgttataattgcttatctcct

SEQ ID NO: 3312 - DNA, 79 bp, Cyanidium caldarium
  Clone ID: LIB190-065-Q1-E1-G2
gtggtgttggtagtgctccaaggagtcaagtaactcgtgtccaagttaccaatttggcactcggtgttaccaggaagga

SEQ ID NO: 3313 - DNA, 375 bp, Cyanidium caldarium
  Clone ID: LIB190-065-Q1-E1-G8
agggctcaaggggaaagcgtctcgtgggaacaactgttgtaacacttcaccgagcagttttcgttacgttctctgtcgtatagcatgctttttggagctgtaatataaccaaagaacatggcttgtgtagcagacgagccggcaggttggacaccgagcaccgaagcagcgcaaactccagtggacaacgactgtcttgccccttcttcccacccctcttcaccttccttgcaagtttgtactataagattcttactattggacagtaacgactttcgtattgccttcccaccggaaaccactatattgcagttgaaacaaagagttctggaagaccaaccacaagcttttttgaactttttagaacacaacaga

SEQ ID NO: 3314 - DNA, 361 bp, Cyanidium caldarium
  Clone ID: LIB190-065-Q1-E1-G9
agcccaagcgtccgtgacgacgcaatacaaatctatcaagaacagccttttggaaagactgaaacacttgaaagcacaaaagaacaattgcttccgtctcgagatatagcgtgtagtgattcagaagattctagccgttctgaaccttttaccttggtagctactatcctcaacgcacatgaaggtgaggttaattgtgtgaaatggaatccacaggatggttacgtcttcgcttcttgtggcgatgacggtgtaataaatatttggcagataagtataaactaattctgactttcggacaagacgcgttgttcactagccgttgtcgttgttctccatattgttatttactgttcgtggg

SEQ ID NO: 3315 - DNA, 376 bp, Cyanidium caldarium
  Clone ID: LIB190-065-Q1-E1-H10
cgcgtcagcccaagcgtccgaaaggagacccaaattaaggtgagagaatggacgataaggaactaggcaaaaggatatggtatctgcggtagaacatatgaaagaagcagcaccgactgtttagcaaaaacacagcactctgcagaaaagagaaaatgtaaagtatagagtgtgcggcctgccaaatagtagagaaaaaatcgatgaaagtgaaagcgagtaaaagatgaggtatagagaatggcggtcctaactgtaaggatccaaaggtagcgaagtaaatagacgtttgaaaggcgtccagtatgaaaggagaaacgagtgtagcactgtctagtcgtccaactcagcgaaacagcaataactgtgaaaatgc

SEQ ID NO: 3316 - DNA, 182 bp, Cyanidium caldarium
  unsure at all n locations
  Clone ID: LIB190-065-Q1-E1-H11
taaaagcaacaacaaccgcaatgcttatccttgtgatttaggaaaacggtttcctcactagggcacgaagttgcatangaatatgtcgagtaacanagaagaaataaataaactaagtgtatttgttttcgaagaagaagcgtattctgtctctcttgtggcttctttgcaagggaccaagt

SEQ ID NO: 3317 - DNA, 387 bp, Cyanidium caldarium
  Clone ID: LIB190-065-Q1-E1-H12
cgcgtcagcaataattgtcgttagtgttgcaaagccaaaagcagttgagcacagcaatatcgatatgtcaagtggctggaataactacagtggaacggaaggtaatgggaatgctggtgctggtcaagggaagaacaaggataagaagactagtggagaacttgcaaaagatagtttaaagggtttgggaatggcagccttgtcagcgggtaagctggtttatcgcggtggcaagtggtgtgtggataaggtggaaggcgccattgacgaccacaagtcataaggaagtaagagtggcggtggtggaaattcacgttattctcgttgaaacgtaataacgtggatagaaacagaacgagacgggtttttatagttgttgtgctggat

SEQ ID NO: 3318 - DNA, 370 bp, Cyanidium caldarium
  unsure at all n locations
  Clone ID: LIB190-065-Q1-E1-H3
ggaagtagaaagaagagagtgtaaggcggcgtcataatagaaatccgaaaggagtagaagaaaagagagagaagaaagaaaagaagagaaaagccgtactgaagaccgacacaggtactcgaggagaaaggagacccaaattaaggtgagagaatggacgataaggaactaggcaaaaggatatggtatctgcggtagaacatatgaaagaagcagcaccgactgtttagcaaaaacacagcactctgcagaaaagagaaaatgtaaagtatagagtgtgcggcctgccaaatagtagagaagaaatcgatganagtgaaagcaagtaaaagatgaggtatagagaatggcggtccaaactgtaaggatc

SEQ ID NO: 3319 - DNA, 329 bp, Cyanidium caldarium
  Clone ID: LIB190-065-Q1-E1-H5
gaattagagaatggagagttgctatggcattgtgcatggggttgaatacaaactgtcagattcctacgaaattgccagctgttttatcacaggaactttctgggccaggtcaggagtcttctgatatgaatgctctcagagaagctgaaatccctgaaggaaactctattcatttaaatgaccgtctgtccgacaagaattgcaacgtcaatgaatctgtagagactgtacacaaactgccacaacacttgagaaatgatcaatacgagaaggcttgggatactgaggctcatactatacaaccaaagcattggacttgcagccttttc

SEQ ID NO: 3320 - DNA, 305 bp, Cyanidium caldarium
  Clone ID: LIB190-065-Q1-E1-H8
tgttgggccctgtggtggtgatgccctggattgagctacgtagtgggaactccgctgtcttgaaagacataactgcaagtattgaaaagcctgacatacaatggataactacgacgaatctcagtacttgtctgaattctgcagaaggaaatgttacggttgacttgtcgcagcagtgtagcttgaaagatatattttcattgaagcttctcgagaataactttaagttggcgtgttttaatgatgccttgtttttagttttaccaggcttatcctttgttattactggtaatcgtatattctgt

SEQ ID NO: 3321 - DNA, 404 bp, Cyanidium caldarium
  Clone ID: LIB190-065-Q1-E1-H9
agcttacagacatgatagccgatcgccttcacattcaaggtctccacctccccgaagaagccaccggtcgaggagcagatctcctccccgaagaagatttcgacgatctccttcagatagtccaaggagacgagatgactattctcggagtagtagtagaagtccgataaggaaggaagaaaatagaaataggaatctttcccccagcgcggagaacaaccatcgtgatgagggcagttatgaagaccgccgtaggtctcgctcaaggagcgttgagagtactgagaggaggcgaggtgagaattcccaaaacgagtcacctagaggtgaagatgaatactaaagtttcaaggaagtgagcgacctgatgttccttgaaacgttccccttccttcctggggtgg

SEQ ID NO: 3322 - DNA, 392 bp, Cyanidium caldarium
  unsure at all n locations
  Clone ID: LIB190-066-Q1-E1-A1
aggcaatttccagagttgatgtcggaggataaccgtgtctttgttggtggtctcccatggtctataagtgaggacgacttgaaacaagtattttccaagtacggagaagtcgtagatgcgagggtggtgatggacagagaaactggacgctctcgaggtttcggttttgtttcatacgctgaaagctcgtcagtggacgaatgtatagctgccttagacggtcaggacctacaaggtagaaccattcgtgtcaacaaggccatgactcgtgaacaacgagatgaagagtttgcttccggaagaggaggtggacgaggtcgttatggaggtggttttcgttctggtggtggctttgagcgtanggactacgataaccgcaggaactatgaccg

SEQ ID NO: 3323 - DNA, 245 bp, Cyanidium caldarium
  unsure at all n locations
  Clone ID: LIB190-066-Q1-E1-A2
agcccaggcatcaggtgctcgtaacgctgctcgagtgattaggaagggtggcatccaaaatggtaccctcaagggatacgtgtttncgggaaaagtcaaggtttcggttcaacagaacctaagggaagataaggtccccacggcttggcagttcgcccattttagtagtaagtttaatgggtttaacacgtccagtggcaattccggccctaaacactgctagatgaaggaaatgctaacctatt

SEQ ID NO: 3324 - DNA, 373 bp, Cyanidium caldarium
  Clone ID: LIB190-066-Q1-E1-A5
agcccacgcgtccgattcgcttgtggcgtgtgaagttttggttaccttgaaagaatgcagatatttgtaaagacacttactggcaagactattactcttgaattggagccttcagatactattgagaatgtcaagtccaagatacaagacaaggaaggaattcctccagaccagcaacgtttgatatttgctggaaagcaacttgaggatggtcgtactctttcagactataatattcaaaaggagtctactcttcacttggtattgcgtttgaggggtggaatgcagatatttgtaaagacacttactggcaagactattactcttgaagtggagccttcagatactattgagaatgtcaagtccaagatac

SEQ ID NO: 3325 - DNA, 385 bp, Cyanidium caldarium
  Clone ID: LIB190-066-Q1-E1-A6
agcccacgcgtccgcccacgcgtccgtgcaaagccaaactatttggaacgtttattagtgctcgttactcaagttggatttttcgccttttatactactatttatctattgtcacctaaaactgcacatcgtatcgttggttacttagaagaagaggcagttgtatcatataccgaatatttaaaaggaatcgatagtggtttgcatgcaaatattccagcaccgcaaattgcgattgattattggcaactagatagcaatgctcgtttgagagacgttgtattggcagtgagagcagatgaggcaaatcatcgagacgtgaatcacctcaaagccaatcttttatatacaaagcgtggaaaggaaactgcacctttgtccgtat

SEQ ID NO: 3326 - DNA, 405 bp, Cyanidium caldarium
  Clone ID: LIB190-066-Q1-E1-A7
agggggagggaggaggatgcaaggttggaagaaaccagtcataaccgatgcttttggaaacagagtaacttatgtgttgaaaagatatttcaacgcacctactactggagaagagttgccacattcgttgggtggtcatgtgaccgatgcagatacgttgttacggcacaaagggctgggagaagaaacagcgtattttctgaaagaagacgctcgcaagtttgaaaagttggcaaaacagttgaaaagtgcgttgaattcagggaaactaatgacaaaagaacaactcaaagtggccatggaacagagaggaatacaagtatctgaagagggtttagaggacttgcttcgtctaaaagagcacattcgattctcggatgcaagtagcagtggtacgtaagaaca

SEQ ID NO: 3327 - DNA, 342 bp, Cyanidium caldarium
  Clone ID: LIB190-066-Q1-E1-A9
cgggtcgacccaaacgtacggaaaactgcaacaacgtcattcctggcgacaacaaacagacaaggtcacaagcaatcggaacccgcaatcttcgaagtagaacaattcccaagcccaattaaagtagttgttttatatttcgctgatatgcctttgtttctcaaaacatattgaaagcttttgaatgtgttaaagagactgatttttctttaaaaaaaaaaaaaaaagacaaacaaaaataaaaaaaaatagcaaaaaaaaaaaaaaaaaacgaaaaaagaaaggaaacgaaaaagaacagaaagaactcaacactagacatgaaataaaaaaaaagggggg

SEQ ID NO: 3328 - DNA, 441 bp, Cyanidium caldarium
  unsure at all n locations
  Clone ID: LIB190-066-Q1-E1-B1
cacgcgtcagcttgacctcaggaagtcttctagtgcaaaccttgtatcctccccacgaagaagcaccaccacaatgtttctcctcctcatctagtatggaaaatgagagtagctacgaccagttctccagaatcgggtttgggtgaaaagtcggaagagtcggtgggtattggaattattggagcaggaagaataggccaagtacatgcagaaaacctggctttccgtatcaagaaaggcagattggtgggagttgcttcaggaaccaaacaattggcagaaagatgtagtttggctactggatgtaagccttattatgactatcatttattattagaggatcctagtgtggatgcagtttgtatttgttctggcttcaatcaacataccanacagattatggaagctgcaagagctggcaaacatatcttttgtgaaaag

SEQ ID NO: 3329 - DNA, 408 bp, Cyanidium caldarium
  Clone ID: LIB190-066-Q1-E1-B3
aggaaatgtacaacgattatatagacgcaggtagcacccacgacgatgaaaagaatactacttggagaacaacaacttcccaagtatcacccgaacaacaacaagaagctgcacagtttcgacaacaacaattacaacaacaacgaagtttacaagcgttgaacgctacgcttgcccagttttgggacgaacaaatgcgagaggtcagcgtcatcaccgactttaaaaaccatatgctacctttggcaagaatcagaaagattatgaaatccgatgaagacgtgcgcatgatatccgcggaagctcacgccttgttttctaaagcttgtgaaatgttcattttggagttgaccattcgagcttgggcacaaacagaagagtcaaagcgtagaactcttcaacgttgtg

SEQ ID NO: 3330 - DNA, 428 bp, Cyanidium caldarium
  Clone ID: LIB190-066-Q1-E1-B4
gaccacgcgtcagcggacgcgtgggcggacgcgtggggtagtggttttaataaatattctatttcctttaaaagaaaaaaaaaaaaaatcaaaaataacaaccaaacaacaaaaaaaaacggcaaaggtttcaacaacagcaattacaagaagaacgcacatttacaatgcgtcgaacgctacgcttgcacacttttgcgacgaacacctgcgagatgtcctcgtcaccacccacttgaagacccatatgctacctttggcaggaaacaccctgactatgacatcctttgaccacttgcacatgatatccgctggagcacccgccttgttttctaaagcgtcgtcactgttcactcttggaattgactattcgacccttgggcacaccacagaacactcacagctgtgaactcttcaacctcgtgata

SEQ ID NO: 3331 - DNA, 409 bp, Cyanidium caldarium
  Clone ID: LIB190-066-Q1-E1-B7
agttttaatatttgactccaccagtcaacgattcggtgtcgctgctgaacacgtttatgacgtaaacgagaataccaagttgcgttttggtgggaaagttcgtcacggagaatcggacccggcaggatatgtcattgccgaatatgactttacggtttccaaagaagattttccgataaacgttcgtgcacgtgcgatatgtaaaagtaaccagtgcatcggcgatattcgtgccaaaaagaagtttgaagtggacgaagacacttctttattcttcttggccaaagcttgtactcaggaactaacaaaaggaagttatattattggtaaagctggagtgacacgtgactttcgtttgggtgaagacacttttcggttgggtgcggtgtgtgaccaagatggaaactgt

SEQ ID NO: 3332 - DNA, 396 bp, Cyanidium caldarium
  Clone ID: LIB190-066-Q1-E1-B8
aggtagaaagaagagagtgtaaggcggcgtcataatagaaatccgaaaggagtagaagaaaagagagagaagaaagaaaagaagagaaaagccgtactgaagaccgacacaggtactcgaggagaaaggagacccaaattaaggtgagagaatggacgataaggaactaggcaaaaggatatggtatctgcggtagaacatatgaaagaagcagcaccgactgtttagcaaaaacacagcactctgcagaaaagagaaaatgtaaagtatagagtgtgcggcctgccaaatagtagagaagaaatcgatgaaagtgaaagcgagtaaaagatgaggtatagagaatggcggtcctaacggtaaggatccaaaggtagcgaagtaaatagacgtttg

SEQ ID NO: 3333 - DNA, 420 bp, Cyanidium caldarium
  Clone ID: LIB190-066-Q1-E1-C1
agggcgaatattcgatgcgtagaaaaaatgaaaatgagacgacttgtcaaaaacactgcttatatttggatgaataaacgtgcacaaaaatagtattcaagaatatgttgagtatacaagttttgcaagtatggacgaatgagcgtatggacactaacaagttgaagattgctaccaagtttgaaatggcactggaagaaactcctttatatatgaatatattatcttcacgatcaacgagaaagcgaaatcgagagtgcattgaattgagtgagcacaagcagaagctggtgccaaaccaagtagtatctactgcaattccagatatatactttacaatgacgctttacagcacggcaaggtggaagagaacaacggtgcttggcagtattgtgcgtcctatcgatgacttgtcaaaga

SEQ ID NO: 3334 - DNA, 235 bp, Cyanidium caldarium
  Clone ID: LIB190-066-Q1-E1-C3
cgcgtcagcccaagcgtccggggtattacaagagatacacttcataagcgtcgccttacgggaggtaaaaaggctatatggaggaagaaacgaaagtataatttgggaagacaacctgcaaacacgaagctgggtccaaaggcagtacgacctgtgcgagtaagaggaggcaattacaagtttcgagcacttcgaatggattctggtaacttttcatggggctccgaggcgccta

SEQ ID NO: 3335 - DNA, 409 bp, Cyanidium caldarium
  Clone ID: LIB190-066-Q1-E1-C5
agaatggttggtttcgtcgcttcggtccttcttttgtgattctcgtgtattgcacgagaaaaagtccttaagatggaaagagctttgaaaagcagtgcacgtcttgtgcccatacgtccaaagcctgttgtaccttcaaaagggtctgaaactttttcgttgcatgtagttggtgccacgtgggatggtggttgcacgtactatataaggggaggagggtcatatattactaatgggagaattacagtaccttcaagggcgtctaatcccatgaccaaggacgagttcttcttactgggtacttactcgagagacaagcttttgccgctgtttgatagaactctacaaagttccgaaacacagtagtgtgggttactttggggtgtattttcacagttgttttaataac

SEQ ID NO: 3336 - DNA, 368 bp, Cyanidium caldarium
  Clone ID: LIB190-066-Q1-E1-C8
agggaagtgttcgtaagcatcaagaactttcaaggaaaccaaaactggccaaccctggtaccaacggcaattcctccaacgcatttttgggaacaattagtcctttgggtgaatttaatggcgggtttgataatcaaggaggaattaaaatactgaaccaaaggtgtcaaaagctggattagttggagcaagtgcaacaaagaaagattaatgattggaaagagaaactaaaagttcttcaaggccgtgtcgatgaaacaactggcaaagacaaaagggtttgagagcgaagaagagtatcaaagaaagttggagcagctcgaaaaggaaaaacaaagcatcatcagtgaaaatatgaaagctgaaga

SEQ ID NO: 3337 - DNA, 342 bp, Cyanidium caldarium
  Clone ID: LIB190-066-Q1-E1-C9
agcttttggcggtggttaagagacatgtctcaaaatttgttacgttgcagcaactaaatgcatttacttgtcgtttaaacgacagctttcaacagattgaggaacgactcaagatgttggaagtaaaggcaacaagactagaggaaacgacgaataaatgggacaagtggctacgaagtattggaaaatggagagtgaaaccacaagacaacaaaaaagtggttgcgaaaaaatagacctttccaacgataatggtgtcacaagttcttacacacaacttacaagctcaaaaaccaacatgactttatgaagcgcttataaaccgggaatttctgtcttttc

SEQ ID NO: 3338 - DNA, 423 bp, Cyanidium caldarium
  Clone ID: LIB190-066-Q1-E1-D1
aggtaacacacaatatgatgatgatgatgtgcgtggtagaagagaatcgagttgtaattacttggagcctacaaatgaatcctcccatgcttccctattggaagaagaaagtggagatattgatctggaatcttcattgaatcgttttcatatggatatggagttgagtcaacgtgctccacctccaccacctacggcaccttctttaggattagaacttggaacgtccgcacctgcaggttctggtcttcctgcaagtcctttttctgttgcgtggactcgaggctcgaggtcatcgagtgttgcaccaggagaaatgaggacttccaagtggctacgtgctagaagaggattgacaagcagtgaaacaagtgatcgaagtcagatgcgttcacgagagacttgatgaagataaagatatct

SEQ ID NO: 3339 - DNA, 311 bp, Cyanidium caldarium
  Clone ID: LIB190-066-Q1-E1-D10
gggtcgacccaagcctcaagccaagcctccggaacgacactacaatggtggtggaaaagttgtgtttaacgcaaccgaccactccggatttgcagtgggtcaagctcggtttccggattacaacgatgaaatgcaacatccatcgccatcccaggatgggtcatcgttgcaaaacgaaacagagaaaataacgattgtttggaagcttggtaaaatacaagaaggattgcatttggctgtggaacgagtatgggtaaaccataccaagtatggtaaacagtttcaggtgcaggtgggacagcagaaccttt

SEQ ID NO: 3340 - DNA, 404 bp, Cyanidium caldarium
  Clone ID: LIB190-066-Q1-E1-D12
gtttgttgaaaagcagcatgatgaagagcgctatgaagttctttgtatttagcattattttggcaaatgttgttcttactattcaagcagcaacggttttggagactttggagtcactgaaatatacagagtatcttgacatggtaaaggctgcaggcctgcactcgaagttcaacgactctgctgttacatggactgtttttgcagcaaacaatactggagtcaatgccaccttggcaccagagcacttggttttctaatatcacatctaatgcgacggagagcaaagacattgtggaatatactttgtacaaccatactcttttgtcagatgatattaagacaggaacaactatccttaccgccgtaaacggaatgaatttgactgtggttaagaatacgac

SEQ ID NO: 3341 - DNA, 318 bp, Cyanidium caldarium
  Clone ID: LIB190-066-Q1-E1-D2
aggaaatttcagggaaaaaaaaaaaaaaaaaaaaaaaaaaaaaaaaaaaaaaaaaaaaaaaaaaaaaaaaaaaaaaaaaaaaaaaaaaaaaaaaaaaaaaaaaaaaaaaaaaagaaaaaaaaaaaaaaaaaaaaaaaaaaaaaaataaaaaaaataaaaagaagataaattcaaaaaagaatgattttataaatacctagacagaaaacttcattgatagtaaacaactattaacacatttttaaaaaaacggcactttcgttataagtaagtactacctgatattgaatgcacaatgtcgaataacgaacgaggatt

SEQ ID NO: 3342 - DNA, 375 bp, Cyanidium caldarium
  Clone ID: LIB190-066-Q1-E1-D3
accacgcgtcagcaaaggctctgtgacttgaaacaaggctacactcagtttggaggtttgaggccctttggagtatctttccttttcgctggttgggatcgacactatggtttccaactttaccagtcggatccaagcggtaactatggtggttggaaggcaacagcaattggcgcaaacagtacagctgcacagtccattttgaaaacggactatcaagatgacatttctttgaatgacgctttgaagttaactgtaaaagttttaggaaagacgatggacagcgctcagttaactagcgagaaacctgaatttgcgaccctctcgtttgtcacacctgagcttctccagttccaccacctttcaactgaagag

SEQ ID NO: 3343 - DNA, 405 bp, Cyanidium caldarium
  unsure at all n locations
  Clone ID: LIB190-066-Q1-E1-D4
agcccacgcgtccgcccacgcgtccggcgaacgagaaaggtcggtatcgttggaaagtatggaacacggtatggcgcttctataagaaaacagataaagaagatagaaattgcccagcacgccaaatatctgtgtgctttttgcggaaaggattccataaagagaaaggcggttggtatttggtactgtaaatcttgcaacagatcaatagcgggaggtgcgtggtctctgagcacccaagcagcagcaaccgtaagaagtaccattcgtcgtttgagagaaatgacagaatcgtaacggagcaaatattaccaacttggctgtntgttcgcaacttgcaagtgaaacttgctgtttcctttatcaataagaataaagagacgagggtctctcactttgcgacaa

SEQ ID NO: 3344 - DNA, 409 bp, Cyanidium caldarium
  Clone ID: LIB190-066-Q1-E1-E10
aggttgagctttgttttggcactgtttttttggggtttcactcgtgtgttttgtatttttaaaactctaagaagactatttatttcttgttatgttttagagtcttttctagactctgttttttggagttgttctactccagtcttggtggtaggtgaatggttctagtgacaaagagggttgtcactttcccgccattctccacagcttcaactaccaacttgtatacgcccacaactgcacaactatattactacagagtcgtggtgtaaaacgacaagttgagtggttgaaaaggattggtgaaaagcaaaggactagtgagagagagcacttgaaaacttgtatatttgtaccccctagaaactatttccgcttgaagagattgcaagtttggtgtattcgacaa

SEQ ID NO: 3345 - DNA, 406 bp, Cyanidium caldarium
  Clone ID: LIB190-066-Q1-E1-E3
agggaagctggcgagcattgggtttcttcccgagagagaaaacgagtgcaaaagttgtctttcgatgtctagtgttgatgcgcatccaacaatagtttatcctcattatgtcagagctttagatgaagaaaaagctcaactaccatctagttttcctcgagaatattcggaagagtttcaacacattttacccaagttgttgcagcgcggttttcatatactaaccaaactaaacaaccaaaagggtaatttatcaaatatttcgaaaaactttgtgttgagccatccacatattcacgtcgttattcttcgaagagccctggatggtgctgttatttactccgcttacgtgggttcccaggtacaaggtccctcgggttttatgcatggaggagctacagcagca

SEQ ID NO: 3346 - DNA, 436 bp, Cyanidium caldarium
  unsure at all n locations
  Clone ID: LIB190-066-Q1-E1-E6
agcccacgcgtccgctcccatgaaagatacagagaacaaggacagtcaagatgtagagtctggaaagaagagcgaaaagaagaaaaagaaaaaggacaaacatcgtgatagtcacggaaaacatagcgaatcgaaggagaagcacaagaaggattcgaagaaaagaaaacacaaacattcgtctgaaaagaagaaaaggaaacgaagctcagaagttccatcgacagattctgatttatcaagtggagaagaaaaaaataccaatgagaatctgcaacaatcccagtttgcgacagagaatactcatagcaacaataatcttatatcttccccgcagaataatttcacgtctccacanaaaaangatcgacccgagacaaaatcttttctctccgaaacaacgaccagaccaaactcagtggaatgcagaagcaac

SEQ ID NO: 3347 - DNA, 394 bp, Cyanidium caldarium
  Clone ID: LIB190-066-Q1-E1-E8
agcccacgcgtccgccagagttcaagaaatacgcatttcaggttcaagccaatgcccgagccttagcggcggaactggaaaagcgaggatataaacttgctactggtggaactgataatcatcttgtcttgtgggatttacgcccagtaaatcttacaggctccaaaatggagaaaatatgtgatgctgcgcatattactttgaataagaatgccgtacatggagatacatcggctcttgtacccggtggagttcgaattggaactcctgcccttacttcgagaggtttcaaagaaagtgattttgtccaagttgcagactttttagatagagcagtgaaacttgctcttgcaattcaagaaaagtctggaaagaacattaaggatttcaatat

SEQ ID NO: 3348 - DNA, 327 bp, Cyanidium caldarium
  Clone ID: LIB190-066-Q1-E1-F2
agcttacaatatatatttggtgaaagacaagaaagaaactctcctgtgggatggcaagtcaaagggtcctcctcgcaagctaaaatttcctcaggcagaaaccatcctggagtcactgaatgcctagaccagttatctagtcattcggagcctttcgctatatgacgacttttaccgaaaagaatccgtgattctggtacaagtctgacaacgtttattgttctttttgcagtcgaaagaacagtaattactagtaaaggctcagaagactggagattgttatttaaaaagaacaatgtgagtcctcaggtgtatctgcccgcggat

SEQ ID NO: 3349 - DNA, 325 bp, Cyanidium caldarium
  Clone ID: LIB190-066-Q1-E1-F3
agcccactcttccgcccacgcgtaccgcgaagatgttccttatgaacacaaagccgtacaagaagctgccgttatcggtgtgcctgaccgatctcgatgagagactgtccgaggttttgttgctcacaaggtcgaatccagaatttcggaatcagatctcaaatgattctgcaagtggacactctgcgtctacacctatccccagaacatcacaatttcatcgcagaaaccattgctctcctcagcggttgattccttcgagttttccagcagaacatgtgattgaaatcttatccgcaatctaactacaatgttgtcactggca

SEQ ID NO: 3350 - DNA, 402 bp, Cyanidium caldarium
  Clone ID: LIB190-066-Q1-E1-F5
agagcagcaaagtgcaacaaccagaaaagcagtcaactccgccctcgtcacctcccaagccacctcagcaagttgttgagacaagtaagcagagttttgtaggttctgaagtgggagtaaagagagtggcaatgacacgaatgaggcgtcgtattgcggaacgactaaaagaagcgcagaatactgccgctatgcttacgacatttaatgaagtagatatgtctgctttgatggagttgagaaatagttataaggaagcctttgaaaagaagcatggcattcgtttaggctttatgtccgcatttaccaaagcagcaactttggctttgttagaacagccggaacttaatgcttatattgacggcagcgatattgtatatcatgactatgtcgatatctccg

SEQ ID NO: 3351 - DNA, 410 bp, Cyanidium caldarium
  unsure at all n locations
  Clone ID: LIB190-066-Q1-E1-F7
agcccacgcgtccggcagcgtttgcaatttttgttgtgagtgagtagtgtcatggcagagcaacaaagaagtgagagtactgaagttagaagtgctgcagttcccaccccttgtataaagggttgtgggttttatggtacctcttccactcttgacatgtgctccaagtgttatagagaacatttgcgccaagaggaacaaagacttcaagtggagtctgtatgtcagcagcagcaacaacaacaacaacaacaacaaaagcaggataaggaacaagaaatgactcaagggtccgagttgcacgacttgccctctaaaaaggagcaaggggaagagacgtcggtggaggtggctcaacctagccagggttttgttgcggagagttgccgangggaaaactcggaatttgt

SEQ ID NO: 3352 - DNA, 206 bp, Cyanidium caldarium
  Clone ID: LIB190-066-Q1-E1-F8
agcccacgcgtccgcccacgcgtccgcccacgcgtccggtattgttgagcagtacaagctatccatgcccgtttctgtatgggcgctttttattcgcacttagtatttaggcctccattcccaccttcatatacacaggaagacttccataaaactgggatagaacccacacaaaacagtgtgtccctgtgtacacacattgaaga

SEQ ID NO: 3353 - DNA, 259 bp, Cyanidium caldarium
  unsure at all n locations
  Clone ID: LIB190-066-Q1-E1-G2
gtccgacaggcgctacngggaatacaactagtttccctagttcggtttccacgggaataccaaccagtgtaccaacaacatcatcttcgattactatccttactgtcttgcaagacaaccactttgacgatacagtacaagctataaatgcggcaggacttgactctttgtttaacaatccttccgctactcttactttctttgcagcanatgactctgtatggtctacttctacagcttctcaagctctgagtgctct

SEQ ID NO: 3354 - DNA, 428 bp, Cyanidium caldarium
  Clone ID: LIB190-066-Q1-E1-G4
agcccaagcgtccggttgaggaacgatgaagtggcaaagcggtcctaggaatacaagttttaataggatacaaacgctactgcttttcttgttgattatttgcaacgtttttccatatagttactctatacaattttatatgaacgctggaacgaagcgttgtctttcggaagaaattacctcaaacacaaaggtgtttggtgaatgtcttgtagtcggtgcggaaggctccatgtccgtagatctgttgattcgaggacctcaaggggagactatagtgcaacagaagaacatagataagcagtcatttagcttcacaacaccacagcacgttcttgctggagattcgagtttggcttccaacgatattcactggcctcctgcaagttatcacttttgtttcgaagctagtcctcctcgtcctcctc

SEQ ID NO: 3355 - DNA, 341 bp, Cyanidium caldarium
  unsure at all n locations
  Clone ID: LIB190-066-Q1-E1-G6
aggaccgacacaggtactcgaggagaaaggagacccaaattaaggtgagagaatggacgataaggaactaggcaaaaggatatggtatctgcggtagaacatatgaaagaagcagcaccgactgtttagcanaaacacagcactctgcagaaaaagagaaaatgttaaattataaaattttccggctgccaaattataaaaaagaaatccattaaagttaaaaccaattaaagattgaggtatagagaatggcggtcctaacggtaaggatccaaaggtaccgaattaaatagacgtttgaaaggcgtccattatgaaaggagaaacgattgtaccactgt

SEQ ID NO: 3356 - DNA, 196 bp, Cyanidium caldarium
  Clone ID: LIB190-066-Q1-E1-G7
gtcctccacgatagcagtgacccatatttacgtgagatcattttccatgaggatctcagcaactggatctggtatctgctcttcgacatctggccgggagcatcatccactgtttaccatttgcacaacactctgcacgctatagaaactgtaagatatcaatcgttcggcctgccaccttccactaaacaaatct

SEQ ID NO: 3357 - DNA, 380 bp, Cyanidium caldarium
  Clone ID: LIB190-066-Q1-E1-G8
agggagaacattgcaattggttactttccctgtaatgtttctcatgttattgatggttctgttttccttttacggagataagaaagtgaatttagccttctttattatcggagttatattctttattattgcctatagtcctggtgctggtcctgttccttggacattttgtgctgaagtatttccaacttatgtgcgtgcagcaggaacgactattactacttggtttgtgaacgctttcaactttgcgctttcattctcgtggccttctatgaaggctgcatggggacctcaaggaggtttcggattctatgctggtttcaactttcttggcatcgttatgcagttcttattcttacctgaaaccaagggctttacat

SEQ ID NO: 3358 - DNA, 413 bp, Cyanidium caldarium
  Clone ID: LIB190-066-Q1-E1-H1
agcccaagcgtccgcccacgcgtccgcccacgcgtccgcaccagcagtgaatcagattgaaatgcatccgtattatgcaagaacagatctgctcgaattttgtaagagtcgtggagttcatgtgactgcttattctcctcttgggagcggtaaacatggtccgcttcaagatgagacagttgcaaagattgccaagaaacatggaaggacacctgctcaggtattgatccgatggtgtctacaacgtgggtgttccgttattccaaagagcgtaaagaaagaacgtatcaaggaaaactttgatgtcttattcgaattgagtccacaggatatgaaggaattggaagccttagataagaacataatcctcaatcatcaaaaggaatattggggtttcaatattcacgcttgag

SEQ ID NO: 3359 - DNA, 418 bp, Cyanidium caldarium
  Clone ID: LIB190-066-Q1-E1-H12
ggctcgacccaaacgtcagcccacgcgtccgcccacgcgtccgcggacgcgtgggtgcaaatgagcgagcaaaccgaccttccttctgaaggcttgactacaaagaaagacctttccatcaaggtggagaatacaactccgacaattgaaggaaaaagtatacctgaaagtttgtggggtcagctggaagaacttgagaaggctgagagtctttcacaaactcatgttgatagcttccaacggaaaagaaaaaaagaggagttcactgtggagactttagaagagggtagtgtggaagagtcacctacgaagagcccacacaagtctacgggagttactccaaaactggagtcgctgtccttatcgaaaaatgaaaataggttgaaaagactagaggagtgtgacctcgcatcactca

SEQ ID NO: 3360 - DNA, 387 bp, Cyanidium caldarium
  Clone ID: LIB190-066-Q1-E1-H2
agcccaagcgtccgtgatacttgaatatgcaagaagaaaaggaatagacagaattgtagagatgaacggcaaatggtggatatatactaggacacctcccaatcgaaaggcactgcggtattggtatgacatggactgcgtggtgttgaacccagtcaaggacttacaaacggccaaagcttatgcgagaagagtaaaataagcagtggagaagagaactacggtcgaattgcccaaacaagatatttgtgtacgacgtagcgacgggaagaaacacggagtggtcgctaggagaggagaagatattgagtttgctcaagatacagcgtttacaaaggcaagtaccgtcggagtaaaagtttggctgagaaagaaaccgtactggag

SEQ ID NO: 3361 - DNA, 243 bp, Cyanidium caldarium
  Clone ID: LIB190-066-Q1-E1-H6
agcccatgcgtccgagcaattacaatttgggacatctgtaggcgctgccgttgagtaattggagtatgagtgagaacataccaacggaggacgtcccataccacccgtttcttaggagaactgtttactggacgccttggccacgcttggctaaactcagtcctaacgaaagggttcgagttaatggcagcgttctgattataacggcgtaaagtggtgtgatcatctacactgaactgcaat

SEQ ID NO: 3362 - DNA, 327 bp, Cyanidium caldarium
  Clone ID: LIB190-066-Q1-E1-H7
agggaaaacgtcatgcagttgcgtattccttctgctgcagtcaaagcacagtacttcgacccaacgcaagttgttgtggaccctgtaagagatacatcacgtcctcttggcactggaggttctgttgtacgaatactatgttgcgatggagtaattattggtgcagatactttaacttcttatggatcgatggctcgatttcaaaacttgtcgagacttgtagacgttactgacaattgtttgttgggtggtggaggtgaaatttccgactttcaagaaattcaacgtcttttagaaaacctcatcacatttgacatttgttttaat

SEQ ID NO: 3363 - DNA, 351 bp, Cyanidium caldarium
  unsure at all n locations
  Clone ID: LIB190-067-Q1-E1-A10
agcccacgcgtccgcccacgcgtccggctcaatggcggagaaaggactggttgttgtgataggtgcaacgggtccgcttggaaaagaatgcgttctggcactggaaagtgaaggatatcgtgtccgtgcagcaagcagaagggttgaaacggctcgtgagatgctactccacaaggtaaagaacccttcgagagtggactttgtccatgtcgatgttatggaaaaatctgtactttctagcgtattaaaggatgctgaagtggttttcttctgtgcttcagcttctgcanggtggagagtccctggtacttctaagaacaccccgaaacaagtggactacttgggcgccat

SEQ ID NO: 3364 - DNA, 393 bp, Cyanidium caldarium
  Clone ID: LIB190-067-Q1-E1-A11
acaagcctcatagtctgagtcatcagtaacccagttggatagagcctcggagagacgtttcgcatacttctggtgatgattatctatttcatgaggacggtggaggaactactcagggcagtggtcgtgaagaagaaagcatccaaataggagtttgttgtgggaagagttgttgtaaaaataacagttggcagatggtgaaccaagtccttgcacagtttaaaggggtgtcattcgaaacaaagcccagtaaatgcacgaagctttgtagtaagaatggcgtaacggtgaaagttcaggataagactttggggaatatgaatgctagtactctttaccaagtgttgaatacttggaaacactgcgaaagccaggaaccagaattgcgtcctg

SEQ ID NO: 3365 - DNA, 384 bp, Cyanidium caldarium
  Clone ID: LIB190-067-Q1-E1-A12
aggtcattgccaccaaaccacaacgattctttgtgtgttggatcgatggaagctctcctatttctgttcttcacttgtcctttgttgacaaataagagtttattcaataaaaccaaaaagtgctatcctcgtagaagaacaagaatgtgttcgtccattcctgtggatagacgacttgtatattttccgttttcgttgttagagaaacaaaaggatgcaagttggacattgaattctaaggctgtatcagagtttctccaacaatacaaacattctccagttttattcagaaattgttttcctgatctattttttgcaattactccagaagagctggcaggacttgcgtgtgaagatggcttcgtgtctcgtatcgttcaactc

SEQ ID NO: 3366 - DNA, 345 bp, Cyanidium caldarium
  Clone ID: LIB190-067-Q1-E1-A4
agcgcccacatttggattctccatgtcttggcaagtctatgtagaccaacatttgcttggttccggaaaggtaaaagacgcagcaatagctagtttacaagggaatatttgggcgcgttctgcgggttttcaagcttccacggaagagttgaaaaagttgattgcaacctttcatcaaaccaaagaagcagctcaaaacggtatttttttggggaataagaaatacttttttttgcgttcgacagaagatactatttatgggaaactgggtgacgatggctttgtagctatgcaaaccaatatgtgtctcatcatagcgatatttaccagacccgtatctgccgc

SEQ ID NO: 3367 - DNA, 377 bp, Cyanidium caldarium
  Clone ID: LIB190-067-Q1-E1-A6
agcgttattgtagtctacgcaaaacaaatcaagttattgttacacatcaaagtattcaccactatagctggaataggaaatggattgcgtcgtcaagtgagcaaagccatcaaagacctcatgtacagtggtatccagggcatattgcaaaggcagagagactcttaaaagaaaaactcaaacttgtcgacgttgttttggaagttagagatgcaagaataccaaagtctactgagcatccagaactcatttcttggattggtgagaagaaacgattgatagtgctcaatcgtaatgatatgggtcctcgcgaagcaataaccttttggattagaacaatgaaacagcaaggttttcaagtttttgatacaaacgcg

SEQ ID NO: 3368 - DNA, 324 bp, Cyanidium caldarium
  Clone ID: LIB190-067-Q1-E1-A7
cgacccaagcgtcaggcataccaatgatcgttgaggaattgtgagcagcagccatgtcgaaaatgctattacgtcctgtttggaacacctttgcacagttgacagagagggggacagaacaactaggtttgctgtcagagaggtctattcaggcaactagtgcgcggaactttttctgaagacccctaaatgaaggacaatcccctccttcgtcatcgtccaaaaataccccacaaagttcttcttgcgagaaagttcctaattggaacgaagggggggattccacggcaaccacattgtttgcaacggaaatgattcgaggac

SEQ ID NO: 3369 - DNA, 394 bp, Cyanidium caldarium
  Clone ID: LIB190-067-Q1-E1-A9
acggcagagttgatacagaaaatggaaactagttggaagaaacacgttgaaatttttgctgaggcgtcgattgctttgtggcatacacaaatgcttatgattgatgagttttccaagtcctccgaggagatacggccttatgttcaagattacttgaataacttgaacacaagtagtggaaattatgtcggggatggaacatcggcgacacttggagagagtatggaacagtcaaaaagtgctgaaagtgaagacaaaaggactacacgaccatttcagcgttcgaggcaaacgacgggtaactcggacagttcttctccaactttagatgaaaacggaaagcaagcttcgtcttcggatatttatcagtctatgagaagtgctcaagcatgaa

SEQ ID NO: 3370 - DNA, 371 bp, Cyanidium caldarium
  Clone ID: LIB190-067-Q1-E1-B10
ggtgcatgtcggaggaagaggaagcagattttcgagggaattgtgactcggttgctattccaaagaccaccgtgaacaaagtggcgacagaagtacttgccaatgccggtaagttgccgaaagaaagtggacgaccaagatggaacgatgtatatgatcattgctatcgtatataggtgcgcatctttcgtccgatgccaaagaactattggttgggttttgttctgaattcgtgcaacttgttagttcccacgccaacgaattgtgtgaaaaggaaaacaaaaaggttatttctcccgaacacattttacagtcgttggaagaactggggtttggagattattgccaagaagtgaaacaagtgtatgaag

SEQ ID NO: 3371 - DNA, 398 bp, Cyanidium caldarium
  Clone ID: LIB190-067-Q1-E1-B11
ggaacgtaaatggtttggaatcgttgataagaaaaggctattttacaacctttatacaacaaacaaatccagatattatctgtttccaagagacaaagatttcccgaaggaaactagcgcagtggagtgtggtcaccaaagactggaactgctttctttcactttgcaagtcaaacgaaggttattctggtgttggtactttttgtaaattgttttgcccgttgttcaaggcagaagaaggtataactggtttccttcctgcagagtgtctctcgtggaactcgaaacgaccgtggttttgtcacttgagagacaatcccacatggagagaaacttcctattctgtggggtaccattttgaagttgggggagactcggataagttattgggactagat

SEQ ID NO: 3372 - DNA, 376 bp, Cyanidium caldarium
  Clone ID: LIB190-067-Q1-E1-B2
cacgcgtcagcccaagcgtccgcccacgcgtccgcccacgcgtccgcccacgcgtccgctcaagatgtcttttttgaaacgtatacagtcgactctgctttccaacagaaactcagtgacaaacgcaagtaaggccaattacgacataaagcacgttcgggtttaccgctgggaccctgaaaagggagaagaacctaaattggttacctactcgattcctctcaaagaatgcggtcctatggtgttggatgccttattcaaaataaagaatgaagtggactctacttttgtatttagaaggtcgtgccgagagggaatttgtggaagttgtgcgatgaatatagatggaaagaaccgtctggcttgtttaactccg

SEQ ID NO: 3373 - DNA, 333 bp, Cyanidium caldarium
  Clone ID: LIB190-067-Q1-E1-B3
gagccacgcgtcaaggaaatcgagtccttgttgaaagaacgagatgctattttgaatggaacaagtgaagaatacttgagtcaattggcgcctttagagaatgaaaggaaacgtagactcgatagagctatggacttttatcaacttcaactacaatatgcagaacagctgtatgagttggccaagaaagaagcatatgatagctttcaagcacaaaaggcagaacaaagagaatatatgtggcgtacgaagttggaaagagaaattaccttgagaatcgtaagattatccattccattaagggacccaaacggacaagtgattgtacgaacc

SEQ ID NO: 3374 - DNA, 356 bp, Cyanidium caldarium
  Clone ID: LIB190-067-Q1-E1-B7
aggttgaccaaacagggactcgacagatatggcttccggtgttgcagtagacgatacatgcggaaaggagttcactgttcttgtgagaagcacgccaagaaagtaccgtgctattattttcaaactcactgatgacctgtcttctgtatgtgtggaaaagacgcttcccgcagccaacataaccaagtgcagtgcacaagaagactggaaaaagtttgtgactgaattgccccaaaacgattgtcgttttgcagtatatgactttgagtatcaaacttctgaaggtgtttccaaaaatagaataatattcattctttggtcacctgaaagtgcgaagataaagtcaaagatgttgt

SEQ ID NO: 3375 - DNA, 316 bp, Cyanidium caldarium
  Clone ID: LIB190-067-Q1-E1-B9
acgcccacgcgtccgcccacgcgtccgaagtttggttgttttcttggtagcagttgtacattcaacatcatcaaatgccaaagggaggaaagaaagattcttcaaagaaagaagccacaagtaaacctgcagcagcagatgctacaaagacgacagaaaagtctggtccggaagccaagttgaagggaactggtgcaaagaaacaataaaaagttgactatgcatgtgcagtcctgttatgttttgtgagttctgtttgatagtttccagctattcttttggtagtgaataaagagaaaattttttatatttacac

SEQ ID NO: 3376 - DNA, 383 bp, Cyanidium caldarium
  Clone ID: LIB190-067-Q1-E1-C10
cttttgaatcagttggatgggttttcttccgatgataatattaaagttatagctgccacgaatcgagtggatatattagatcccgccttgatgcgctcgggtagaattgataggaagattgagtttcctttaccggatgaaagttctcgagctcgtatacttcaaattcattcaagaaagatgaatgttcatcctgatgtcaattttgaagagttggctcgtagtacggatgatttcaatggtgcccagttgaaggcagtttgtgtggaagctggaatggttgctctaagagctgatagaacggaaatagttcatgaagactttgtagaaggcattgcacaagtgcaagccaaaaagaagggaaatttgaattatttcgcttg

SEQ ID NO: 3377 - DNA, 384 bp, Cyanidium caldarium
  unsure at all n locations
  Clone ID: LIB190-067-Q1-E1-C11
cccacgcgtccgggtgggtggtgaacagcttgggagaccttggaagtaaggatattatgcaaggacttttattaagatcgcttttatttgttcccggaaatagtgagaaaatgttacaaaaagccttgcaggctcgtgcagatgctttgataccagatttggaagactccgtaccgaaagatgagaaggtcacggctcgtaacctcgtttccaaaatgttgccttcgttaagaaacaatactccaaagaaggttcagataattccaagggtcaactctttttatacgcagtggtttgaggatgatttaaaggcagttctccaacctgggatatcncagtaaccattggaaaggtanaaagtgctgaagagatgaaagaaattat

SEQ ID NO: 3378 - DNA, 371 bp, Cyanidium caldarium
  Clone ID: LIB190-067-Q1-E1-C12
gcaccgaaaagtagtttgtttcaaccgattgtacggttggttgaaaggttgatgcgtttctggaagttgtttttattgtttcttatgtctccattggctggtcgatattcaccggtaagaggatgatggttgagggaggggtttgtaggtgcactgacacacaacaattgtgacaaggtttcactggtgttgaaaatattgggtttggtgccggaagagaccgctaggatgtcgttggatgacaacacaaacacggtgaatagggtacaaacgggacctttggaagagtcgacccatacacataacgacgatcaggaatccaacttgtgagtttttgtagatggaatgattgtatgtagctctggaaaaga

SEQ ID NO: 3379 - DNA, 335 bp, Cyanidium caldarium
  Clone ID: LIB190-067-Q1-E1-C5
aggaaaacttggatagaaaagcagaatactagtctttttgttcaagtatccaacttgcaattatgaaaacaacgctatggaattcgtttaaaagaataattggactctccagtcttgcaacctagaacactaacgcttcttcacaaacttactcacgattattccatacagcacggaatactagtattcgtacatccattggaactgacagtttttggacccagaaacacttgtttgataggaaaggtttcaatattccgaaccgaaagtatttcctcaaaccacgtcaagacgactatattcactttggtggaagaagggagtcggtttgggat

SEQ ID NO: 3380 - DNA, 319 bp, Cyanidium caldarium
  Clone ID: LIB190-067-Q1-E1-C7
acggttccgcgggatggcgccttctctaggcaaactttgggtttatccttcgggagtggtttttctaggtgcagctgttgttttgtatggtttgcaacacgataaattgccactagagagagtccagtttgcaaaaaccttttcaaagcccgtttcaaaagcagataatcaagttgttcgagcaacaccggaagaatgcgattgtcttccgctttggcagtgtatgactagtggccaagacgactgttctcaacttgaacgtgaactgaggctctgtatggaacgaaacaaggtaagggaacaacacaagcgcactgag

SEQ ID NO: 3381 - DNA, 367 bp, Cyanidium caldarium
  Clone ID: LIB190-067-Q1-E1-C8
agcccacgcgtccggagtgctcagaaactaaagtttctgactatcttgaagaaaccttcatggtcgggaacgaagaactgtccacgacaggcgcatcactgggggtcgcctcttctattttgttacccaagaaattcggtgaagactttcctttggagagttctggcagtaaaatttctagggtgtttttgagaccggatttgatagacctttggaatggtctagtggatgagcgacacatgcgcaggttaaatatattatctgctgctagtgggttaggcaagactatatatctttatctgatcgctgtctttgcccgacactttgaaatcccagtgcagtatattggaaacacgagagatctgct

SEQ ID NO: 3382 - DNA, 380 bp, Cyanidium caldarium
  Clone ID: LIB190-067-Q1-E1-C9
agcccacgcgtccggcgaaacaagagaagggaagtaaaaggtaagaaaatacgaggcgacctggttttttttccatcccacgttggtagcttttgtatgtacactcgttggttgtattgcattgttgtggtttctattacaactggctattgccaatccgcaatatcgtagttggaaaaaagagtggatagctatcgttgttgcgtcgataggtttgggagaaggattgctatttacgttgatatacagtggacaaagtttatgaactaaggttggttttccctggtagttgaggacaggtgaaatattttcctggttgcttgtctcactcgtcgagccccttgttgtaataaattgccgctagcctccatttctttcgc

SEQ ID NO: 3383 - DNA, 351 bp, Cyanidium caldarium
  Clone ID: LIB190-067-Q1-E1-D1
agcccaagcgtccgcagttttggccttgtctttgccaaacactcctctggactcttcatcacacaactgtccaaaattcatatttcagtcattgtatgcacacaatgagcagaagagtaaaaatattttggagacatcaagcaattatcccaatagaagctcataaagagtattcctcagccaaagttaccggagccaggcatggttcaactagctgccagttcataaccgttgagattccctctgatatcagatagttgtcgcgtgcggatggtttccagcaagagattatgttattgatcaaacttctgaattatctatcagaaactgggagtccaaacgagagataaa

SEQ ID NO: 3384 - DNA, 398 bp, Cyanidium caldarium
  unsure at all n locations
  Clone ID: LIB190-067-Q1-E1-D11
gtgtgtcatgggaagaagaggtggcagtggtgctgctagaagaactccgctaaggtcaaaacctcccctttttgcaaaaagagaaagggaagaagcaacaacgaaacagtcttcacgtcctgcgtcttcgctggccaacgtgaagaataatcctacgagtggaaaccaaagagagaagaccaaccaaacgacgacccctccaactcagaagcctagtatgacctcttctctttttgggggaatgctangaagtatgctccccatgtttttatttatgaactggttcaagaggaatcccgaggaaagggaaccagacaaagatgagatagctcagaagaagtgtcagaggcttgcgtgcaatattcaagattgtttggaaaaaaacgactatcagcaaa

SEQ ID NO: 3385 - DNA, 115 bp, Cyanidium caldarium
  Clone ID: LIB190-067-Q1-E1-D2
agcccacgcgtccgccgcttaagttcacgaaaaattctactggagactttgtggaacgtgatccggtctctgctgctgacgtgaaagcaggaaagtccgtcgttcaatttttgga

SEQ ID NO: 3386 - DNA, 356 bp, Cyanidium caldarium
  Clone ID: LIB190-067-Q1-E1-D3
cacgcgtcagggaaagtgaagaacttacgggtggatatggatgccatgtttatttggaagctactggaaatcccaagagtgttgaacaaggtctctagatgattcggagcgatgggtgatttggagagtttagtgtagtcaaagacaagactgctgtggagtggacgattattggtgagacaaaggagttggttatactaggagcacgttgcactggtgataatggatataaagtagctattgatatgattctccgtcaccaaattcctggtggtcgtattgttactcacgaactaagcttagacaatattattcaaggcattcaatatgtcaacgagtggaaagagtcgattaaa

SEQ ID NO: 3387 - DNA, 362 bp, Cyanidium caldarium
  Clone ID: LIB190-067-Q1-E1-D4
agaggacatggaaggaaggcgcagtatcctaagcaagtgtggcacccctttggaggcaagtttcctcatccgagggattggaagaagcacacgaatatagctacccttattatggcactcactgtgatccctattagttactatgccgagaagcatactgtctattaccagtatccttatcataagattccttggaggcccaatttgaaaacttttgatgaagatttggaggagcgaagaaaggccaagatggagaggaagagtgttgcaagcgatggtgatgaacagctcgattcgtagaacttgggaaaaaaggcattccttgttgtgttaagtgttttcgataaatgcacttgtcaact

SEQ ID NO: 3388 - DNA, 370 bp, Cyanidium caldarium
  Clone ID: LIB190-067-Q1-E1-D5
cccacgcgtccgcccacgcgtccgcccacgcgtccgattcaacgaacgatgaagttccagtacgttagtcttttattggctctcttatgcgtaggttctgctctggctgctgaattggcacctggaattgcggaaaaaccggtagagagaggatatgaggaaccctgctgtaccgaatattgttattgggaagaaatatgtatcacacccacacccacacctacaccagcctactattactattattacgcaagagatgcaaaacaggaaaatgtcgagagaagcgtagaaaagagtatctcttccgcagaaaaatctgatgcggttcgagggtatttccccacgtactactattatgagactcctacat

SEQ ID NO: 3389 - DNA, 355 bp, Cyanidium caldarium
  Clone ID: LIB190-067-Q1-E1-D7
agcggacgcgtccgcccacgcgtccgcggacgcgtgggtatcccagctacctgaagcagatatgacgagcatttctcgacgccaaatgattgccaagacttgcggtagcgatgggaggaagagcaggagaagagcttatttttggggatgacaatgtaacctccggtgcggaaagtgactttacccaagccaccagacttgcagaagccatggtaacgaggtacggaatgacggataagattggcaaatttgtgttggggagagaaacagagagtcccgaaatgaggagtctcatcgacgctgaaatgaaaaagttgctggacgaagcttacaatcacgccaagcaagttttgac

SEQ ID NO: 3390 - DNA, 397 bp, Cyanidium caldarium
  unsure at all n locations
  Clone ID: LIB190-067-Q1-E1-D9
atttgagctctgttttggcaccgttttttgtgggtttcactcgtgtgttttgtctttttaaaactcgaagactatttatttcttgttatgttttagagaattctctagactgtgttttttgggcttgttatacgccatgcttggtggttggtgattggctctagagacaaagagtattgttactttcccgccattctccacagctccaaccaccaacttgtatacgcatacatatacataaccacatattactcgagagtcgtggtgtaaaaaacgacaattcgaatggttgaaaaggcttgataaaaagcaaaggactagtgaaggtgttagagaaagcacttganaaagggggccacttccttgtatatttgtgcccctagtaactaactaattc

SEQ ID NO: 3391 - DNA, 374 bp, Cyanidium caldarium
  Clone ID: LIB190-067-Q1-E1-E11
aggtaggcatttcgaagcttagcagtccttgtgcgaagaatgcatatcgcgtgtgtggaaaggaatgatatctattggacaatctgttgacgcgtgagacggaagaatcacccatggttggagatatgatactttgtgaatatccatatgtcgaaatgaagcgttggatcatcatgcataatctgagtgagcacgtcattgaacatggtttgcaatgggaaactgcctgtggtagccatcgttcttttcgctttcacatcttcgatagttgtagtatcaacatatgagttgcctctcggcgaatacatcgtaggtttctcaatcctactccttacaaggtgtcggtttcccagacattgtttgattttatccat

SEQ ID NO: 3392 - DNA, 366 bp, Cyanidium caldarium
  Clone ID: LIB190-067-Q1-E1-E2
agcccacgcgtccgcccacgcgtccggttgcaaagaagaaaacatgtcaaagtttgccttgcctgcattgccttatgactacagtgccttggaaccacatatcgacactatgactatgaacgtacatcacaagggccatcaccaaacttatgtcaacaatttgaatggtgccatacaaggggaacatgggggtcagttcaagggtctctccatcgaaaacatccagaggaatgctgcaaaggcacctgatgctatcaaggcagctgtgagaaataatggcggtggtcactacaatcattccttgttttggacactcatggcacccacagggatctgcaaatagtgcatctcactgtgagttgaaac

SEQ ID NO: 3393 - DNA, 345 bp, Cyanidium caldarium
  Clone ID: LIB190-067-Q1-E1-E4
agggctatgggaaaagattactacgcaatactaggcgtagatagaaatgccgatgaaagtgctttgaaaaaggcttatcgcaaacttgctgttcagtggcaccccgataagaaccctaataataaagagtttgcagagaagaaattcaaagaaatatcggaagcctaccaagtgttgtcggaccctgagaagaggaagatttacgatgcatatggagaagaaggcttagccgcacaaatgggaggcggtggtggtgcaaatggtgcccaaggttttggtggattctcttcaagtggtggaacaacattcttccgaagtacgttcaaagatccggaagagttgttc

SEQ ID NO: 3394 - DNA, 352 bp, Cyanidium caldarium
  Clone ID: LIB190-067-Q1-E1-E5
agaaacgaccaacggcttatttattgtcggtggttgtggtggttgttgttgtgttcttgtcatgtcatttcaaaaagatgaagaaccacacgattatttattcaaaattgttctcgtgggcgattccggagttggcaaatccaacttgttgtggcgtttcaccagaaatgagtttcacctcgactcgaaatccactattggagtggagtttgctaccaaaacatttcgtttggaagatggaaaggtggtaaaagcacagatatgggataccgctggacaagaacggtacaaagctatcaccgctgcctattatagaggtgcctttggtgctttgttggtatactatattacc

SEQ ID NO: 3395 - DNA, 393 bp, Cyanidium caldarium
  Clone ID: LIB190-067-Q1-E1-E9
aggaagatatttcaaagcttactattccttgtgccaagaaggcatatcgcttgtatggaaaggaaggatatccattggtcgatttgttgacgcttgaaacggaagaagcacccaaagttggagataagatactttgtagacatccatatgtggaaaggaagcgttgtatcatcgttcctactcgtattgagccgttattgaagttggtttggaatgggaaaatgcctgtggagccatctttcttttcgctttcgcatcttcgagagttttgtaagcaagaaatgagttgccttcgggaagaccatcgtaggtttctcaatcctactccttacaaggtgtcggtttcccagacattgtttgattttatccatcgtttgtggttggaagaaactc

SEQ ID NO: 3396 - DNA, 387 bp, Cyanidium caldarium
  Clone ID: LIB190-067-Q1-E1-F11
agctttttggactttggatttgcacgtgtgggtgtgctcagtcagaactgcttctcagttagttacgcaatatgcctagtcataaggaacaaaataaaggaattaaaatatcagctgacggttacgcactaaagttgagcggtattcggttggacgtagacggcagtttggtcactatggtggacgcagacgacctcagagccctcatgtttaaggaaagcctcaaggaaaagtcaaagctgcatgacccaaaatttttcaaaagctattatgaggagaataaggactacttttattatatgactcatacggagaagaaaatgtttctttctctggaagttgcacgagaatacgctactctggtgggaaactcgtttctgcagaaat

SEQ ID NO: 3397 - DNA, 363 bp, Cyanidium caldarium
  Clone ID: LIB190-067-Q1-E1-F2
acgcgtcagcccaagcgtccgggcaagtccaacgtcgttgactgatttggtgggaataagctccttttgttgtggtttttggatgcaaggcacgtatccgtaccgactgtcacttattggtcgtacactttttcacaagtctgccccaacccactttttcaattatttaagagacagtgttcaaaaagctagacagcaagaagtggatcgaaaacaatttgagttgttaaaaatacagtgtgactatattttgcaagacccgccattgaatccaaacaactacttagaactgctgaaagaagcaagagaactcttaaaattcaaagggttccgcgaaaagtttgatgtagtgaaacaagaccc

SEQ ID NO: 3398 - DNA, 347 bp, Cyanidium caldarium
  Clone ID: LIB190-067-Q1-E1-F7
agcccacgcgtccgcatcgagacaaaattgtattaatggacgatatgttttatgcgggaaatgaaaatttgccgtgtcttacttctggtcgcgatgccgtgatcgaaaacttgaggaaacgttttatgcctggacaaactcgacatcaacgagctcaacgaatgatgagacttatcgacgaaagtatcgataattggcatactagatggtatgatcgatatcaacgtctgtatacgggaattcattgagatgtaatgcacaggttgtggaatattatattcattttgatatataaaacgtgtatgtatgggatatatatatatagatatatatatatatgtattaac

SEQ ID NO: 3399 - DNA, 314 bp, Cyanidium caldarium
  Clone ID: LIB190-067-Q1-E1-F9
agcacagattcctgttgatattcagtggaagatttgtcattatatggaagtattgtgtgaagaatcgtccaaagttcccgttgcagtgattttaaaagtattttacgatgaagatttggttgaagaagatgtgatattgaagtggtattactctgaaaacagaggagtgggaggaaaggttgcaaggaacaatgcttctatgttggttgagtggttggagaatgctgaatcagaaagtgattcttcagcctgattgtgttgttatgtgagtgcttgtttcgtgaaataaaagcgattccttgttttctgcaccg

SEQ ID NO: 3400 - DNA, 288 bp, Cyanidium caldarium
  Clone ID: LIB190-067-Q1-E1-G2
cacgcgtcagagaaatccgttaaataatccgaataccagattagttgttagttatttagggttggtgaacactgcttctgcaggtttattcggttatgataaagagaaaagcgagaacgggatgttgggaagttcctgaaaagggtctttgttccactgccgttggttggtggttggttgggaggttttgtggctatgaaaaagtttcaccataagacaaagaaacagagctttcttcaaaacgattatgcctgtgttgcagcaaatgtgggaatgataggattggtt

SEQ ID NO: 3401 - DNA, 361 bp, Cyanidium caldarium
  Clone ID: LIB190-067-Q1-E1-G5
agtctggaagtgtgctaggaataagcaggagaagtagaagagagtaggaaaagaagaaaggagagggcgtaagacgtgatacagagtaggaagaaaagagaagagagctagaaaggaggtaaaagaagagtaaaaggactagaagaggtacggaattcacgaggaaggagcgtgaaggaaggaggaatcccaagtaatcgaggaagaaaaagcttcggtgaaagcgtgaacggattttgtacacactgcccgtcaagttctggaagtgtgctaggaataaaccgagaaccttacctctccaagaaggtgttgcacggctgtcgaaagaacgtgctgtgaagtgagagaacgtacgagaaag

SEQ ID NO: 3402 - DNA, 365 bp, Cyanidium caldarium
  Clone ID: LIB190-067-Q1-E1-G6
gactccaccagtcaacgattcggtgtcgctgctgaacacgtttatgacgtaaacgagaataccaagttgcgttttggtgggaaagttcctcacgggagaatcggacccggcacgatatgtcactggccggtatgacgttacggtttccaaagaagattttccgataaacgttcgtgcacgtgcgatatgtataagtaaccagtgcatcggcgatagtcgtgccaaaaagaagtttgaagtggacgaggacacttctttattcttcttagccaaagcttgtactcaggaactaacaaaaggaagttatattattggtaaagctggagtgacacgtgactttcgtttgggtgaagacaactttccgg

SEQ ID NO: 3403 - DNA, 388 bp, Cyanidium caldarium
  Clone ID: LIB190-067-Q1-E1-G9
agccttgtgtgagtgttcctggagtgaagacgaaatatgagaatgtgaatgtcgttacagttcgtgagaatacagaaggagaatacagcggtttggaacacgtggtgtatccaggtgtggtagaaatgatcaaattgatcacgagagaagcttcgttgcgcgttgctagatatgcttttgaatatgcgaagaacaatcaaagaaaaatggtaactgcagttcataaagcaacggtgatgaaacgagcagatggtctctttttagaatgttgtcgagaagtggctcaagaatatccgaatattcaatatgaagaattgttgatcgatacatgtgctgctcgcttggtacagaatccttcgcgtttggatgtcatggtgatgcccaattt

SEQ ID NO: 3404 - DNA, 223 bp, Cyanidium caldarium
  Clone ID: LIB190-067-Q1-E1-H12
agtgagtcgtatcatgcgtccgcccacgcgtccgggacgcatgttcgggaccccattcggcggcgacacacaaccgtaaatgctgactctcaggtcgatgacggggagtacatgacgaaaccaagatcaccgaagcccgagtactatatggagtactgtgtctgcaagcatgcacgtatttctaccagatagtgtaaaccgcgtcccttttgcataatgtccc

SEQ ID NO: 3405 - DNA, 381 bp, Cyanidium caldarium
  Clone ID: LIB190-067-Q1-E1-H2
cacgcgtcagccttgcaatcgtatcttctcgttgctttgactgccaccgttgccgctggttttacaactttagttacgagatacaagcatgtatttagtatgttgagagctagatggtttagggacgtgtttgaagatttgcgcttaagacttcgagcaagtgaagccgccgccataagggagagattggacttgctagaagctaaaatattgtcttcaagcaacagcagtagacgttctgtgcattcgcctcgtacacttgcagaagagaaacctattcctgagtgggatctagttaccagagaagatttcgttactcttcgaacgagagtagatgatctgtccaaagagttgactagtatcaagtcccaagctgacaag

SEQ ID NO: 3406 - DNA, 392 bp, Cyanidium caldarium
  Clone ID: LIB190-067-Q1-E1-H4
gtaagagtaaaacaattcccaagcccaattaaagtagttgttttatatttcgctgatatgcctttgtttctcaaaacatattgaaagcttttgaatgtgttaaagagactgatttttctttatttttgttttcgtgctataatttgtttatgtttcctgtttgtcgcctttcttctatttctaaaggacaagcctttgaacacgctgtgttgttgtatctttcctacttgggtttttgcatacgtagtactggaggagttggtgacgggggtatcgactttcgtggaacttggaaacctaataaagcaatagagcctgtacctgtcgtcggtcagtgtaaaacattatcaagaaaagttggtgttcacgttatcagagagatggaaagaatc

SEQ ID NO: 3407 - DNA, 396 bp, Cyanidium caldarium
  Clone ID: LIB190-067-Q1-E1-H5
agcccacgcgtccgcagagaccttccacaaatgacatgaatgaagcaagttgctttccgtaaattgaaaggcattgtattacataccaagtgtgttgtaagacttgagttactgcacatgctcctttggattgttgcttccgacaccgttttgagtaaaaacttccgaagtaactatctcttttcttgtccacgaagacttcaaagggccaaaaacattcgtacttttattgctgcctcactatcaagagtatttgtaggaaactctgttggttccacagtgaatggcactcacggtacaaatattcatccaggaatggttgtacaccttgaagaagaggaaacacaacatctgagagctcgtcgaatagaagaaaatcaagtgttggaggttttc

SEQ ID NO: 3408 - DNA, 381 bp, Cyanidium caldarium
  Clone ID: LIB190-067-Q1-E1-H9
agaggatccagttccttatagtaatagagcagctactttgaccaaactaggacaattcccttctgctttagcagattgtgaaaaatgtttgcagctagatcctcaatttgtaagagcttatgccagaaaaggtgctattcatttctatatgaaagaatatcataagagtttggatgcctatcaacaaggacttcaagtggatcctaataatgcagaattgaaggaaggattgcagaaaactttgagtgctattgcagaacaacaacgctccgagaaacctgatgaagaacaaatcaaacatgcaatggcagatcctgaaattcaaaagatattgatggatcctgtattacaaaatttgttacaagaagcgcaatcaaatcc

SEQ ID NO: 3409 - DNA, 435 bp, Cyanidium caldarium
  unsure at all n locations
  Clone ID: LIB190-068-Q1-E1-A2
aaagaacaacgaagcatttctgattgtcaactatccaaaggacgagatgagttgggacaacgatggacagcgcctttggacaggcaaagactttgtagaatatgtcaagttgagatggggaaatcctttatttcgtagaaattgctgttggtatagtacaggcagtatagtatcttgtgacactggaaaggttttacagagttgggtttcgtgtgagttgttgagatcaatagtacgattatttaggtcgttgcactgcttgaagggttagaattaggaatggtgaagagtatatcccaaccatctagtaatcaagcaacagtagaagctctagtttcctcgaaaaaactgtattttctcaaggatccagtaacangaaagtattggaccgaacgagattccaaacgagtaaatccacatgtttatcctcaaaaa

SEQ ID NO: 3410 - DNA, 274 bp, Cyanidium caldarium
  Clone ID: LIB190-068-Q1-E1-A3
cgcgtccatggaaaaaaaaaaaaaatcagaatgataaaaaaaaaaaaaagaacaaaaaaaataggaaaaaaaaaagaaaaaaaaatagaaaaaagcaaagactttgtaaaaataaataaaattgggggtggggaaaatcatttaattcgtaaaaaattggtgttggtataataaatcgcactatagtatcagtgtgacactgggaaggttttacagagttgggtttcgtgtgacttgttgagatcaatattaggattatttaggtcgttgcact

SEQ ID NO: 3411 - DNA, 372 bp, Cyanidium caldarium
  Clone ID: LIB190-068-Q1-E1-A6
agcaaaacaacaacaacaacaacaaccgtcatcatatctgaaacaacacgtactccacgaacatcgcagttgggtcgttctttaactacttgtactattaaggaacctgacccagtatttcttagttcttcttttcctccataacaacaatgaaaaaaaccagcagatgcttctcgttggttggaaataaaggtttggctgaattggaacgtatggaaaatattcctttgcgtgaataataaagttgttttcaacttatttcttggcatataaaaaaaaaaaaaaaaaaaaaaaaaaaaaaaaaataaaaaaaaaaaaaacaaaaagaaaaaaacaaaaatagcaggaaaaaacaaggacggtgctaaggat

SEQ ID NO: 3412 - DNA, 346 bp, Cyanidium caldarium
  Clone ID: LIB190-068-Q1-E1-A9
taaaataacgggtaaaaccaaacaaccggttaaaaattcgccctttctaaaaaaatcttcgacgcacagggatatgaagttcccttcaaggtggagcccattgatgagtactgcatccaacaactcaaggaatacgatggaaataacccggtttgcgctatacaggaaggtctgaaattggacgaaacatatgaagataacatagagaatgaggaacaaaagaagtctttcgaacagttgttcactgttattaacgaaattcttggagacaaagtggagaatgtggtagtttccgaaagacttgcggaatctccatgtatccttgttaccggtgaatttggttggt

SEQ ID NO: 3413 - DNA, 410 bp, Cyanidium caldarium
  Clone ID: LIB190-068-Q1-E1-B1
acgcgtccacggacgcgtgggccaatttctcaaaagattttccttcacttgcaaactattttacatctttgctacataccaagtgccatcctgctgcacgcaaaccaacataaaagactcgaagcgacagggaaatatttactccacttttgcgtgaacgggttttagtcatcctggttcctccccagaccctcgtcttccaaggtaacaatatcctggaagtcgggtttcgagtcatcaggcattattctgtactctgtcttttgtcgtagcacatttgaagccttgtcttgtggaagtaatccttcttcgaaaagtgtacgaaaactgccttgcgaatgtttgtcgttattatcactaagataacggtgatgatacacagaagatgcttgaatttcccttttaaaact

SEQ ID NO: 3414 - DNA, 398 bp, Cyanidium caldarium
  Clone ID: LIB190-068-Q1-E1-B2
cccacgcgtccgcccacgcgtccgcccacgcgtccgcccacgcgtccgcggacgcgtgggtggtgttgcaacagccactgttttgaaaggtctggggttggagttgcttggttatgatgtgtttcctaatcaagactttaagaatttgggtggtcgatatgtggagttgaatgagttgctttctcagtcggatattgtgagtttacattgtccattgaatgagaataccaaacatctcatccgtgcagaaacgctttctataatgaaacctggagcttatcttatcaatacgagcagaggagctttgatggatacgcaagcagtattggatgctttatattcaggacatattggggctttggcaaaggatgtatatgaaggaaaaggaaacttgtttt

SEQ ID NO: 3415 - DNA, 411 bp, Cyanidium caldarium
  Clone ID: LIB190-068-Q1-E1-B6
ggccgacccacgcaaccacccacgcgtccgcccacgcgtccgggagaagagagaggaatgttggcgttcgtgtatggacaaggcggttgtatactacaacaacagcaacaacactctttacaaacaagaaggtgtttcctaggaaaccaaaactattttgtcgggaagaataatgctactgggaaaaacacaaaaacagtagttttcaaaagacgaaaacaggtagtagctgtacagaccagtcatgtcgacagtctaggttgcacgagggaccagaaaaagaatcaagttgagtttacccaagttcctgaccagagaggacactttggtagatatgggggacaatttgttccagaaactttgttcttttgtttggaaaaccttacaaagtgtttcgaggaaaccacagac

SEQ ID NO: 3416 - DNA, 397 bp, Cyanidium caldarium
  Clone ID: LIB190-068-Q1-E1-B9
tttcttgtgcaatattcatgctgttggtgtcatccgtcaactaacactatattgatttttaatggaatagcattttcttagaatccattggacagacactcctacacgagctggttatccaaaacaagatgtgcccttctaccagtgctcatcatcacttgactcatagtgaaacccaaaagcttcgttttcccacgtttgtagatctccacgttctttggatacgagcacatactagcgatattcaactgctccaacatgtccttatccgttagctgttgcaaaccacgttcatctacaatgcattttaatgagccacctttttccaaaatgaatcgaaggatatcattcgcaattctcacactgagtgtcatattttcaatgacggagattattt

SEQ ID NO: 3417 - DNA, 429 bp, Cyanidium caldarium
  Clone ID: LIB190-068-Q1-E1-C1
aaaaaaatgtctgctgaaccggtgggaaagttaaactctggtgcaactattcctcttcgtggctttggaacctggaaagctgagcctggagtggttggtgaatgtgtgaaaactgcttatgacgtcggttacagacactttgactgtgctgctatatatcagaatgaaaaggaaattggacaagctttttcagaacttttctccagaggagtgaagagatcagacatatttgtcacttctaaagtgtggaatacctgccacgatcctcaaagagtggtcgaagcttgtaaacaaactctgcaagatttacgtctggattatctagacctttacttggttcactggccttgcaactgggagtttatgggtctgcctattactgcagataactggattcctaatgataatgatgggaacataaagttttcc

SEQ ID NO: 3418 - DNA, 358 bp, Cyanidium caldarium
  Clone ID: LIB190-068-Q1-E1-C11
acgcgtccacgatccgtcgaaatattcaagttgatatccacatacacagttttagatagatatgtatatgttgaaacgttccatttcctctagttgtaagttatacagtcaaattctagattctccaatacgttgtctacttgttggttccactccgaggcagtcccattggttttgtacgtctagtccacgagatggggaagaagaggaaagcagcgtcgactttgtcaagtcttatcagaaaaagttccgatcctctcattctccttttttggatttggaagaggaaggcctgaaacaaaaggcttctgaagacagaaaagctttggtgagagagttttacaaatatccagttttt

SEQ ID NO: 3419 - DNA, 401 bp, Cyanidium caldarium
  Clone ID: LIB190-068-Q1-E1-C3
agcgagcgaaacgcaatctcacggtttctgtaccgacaatcgatgaacaacttcatctgcatcaaatgttcaaaagaggctttcgtccagaagaagaagtatacatgagtcaagttaccgttggatcaactcattttatgcttccagatgaaagaaatatgtatggctttacgtttggaggagttttaatgcgaagagcctacgaattggctttcgtcaacaattatttggcgtttcaacaacgtccaacggcagtagaagttggagatattagctttatcaaatctgttccagtgggcagcattttggaactgcattcttctgtagtgtatacaaaagatacttatcaagtagttttagtggatgcgatggtgaataatttgatgcacgaccctccaacc

SEQ ID NO: 3420 - DNA, 418 bp, Cyanidium caldarium
  Clone ID: LIB190-068-Q1-E1-C4
acccacgcgtccgattgttggcaacgacaagagatgcgcggctggtggctatggagtttgttgttggtctgtttgtgtttgttcccactatccaactccgttcaacaagatgaagcgtttgttcctattggtcctcttcgtgaaaaggatgagcacgcaacacagccttcacaacctgttgtaaagccacatggtagcaaacactggaagccgctccagtgtactcccaacaaggaaaaagcagaggcattgatacaaaaggcacaaaatagtttgagtgcgcttttctcaaaccggttgttcaagcatatagacgtcgaaagttgtcaagagtttagagtggtcgaaataaagcttgacgaaaaaggtttgaatttggataatggacaagagcatatcaaggaaagctttagaatat

SEQ ID NO: 3421 - DNA, 426 bp, Cyanidium caldarium
  Clone ID: LIB190-068-Q1-E1-C9
acgcgtccaagaaaatggaatttttcaatcaaaatggttttcgtcgtatgaagaatacttgtttggatgatggctgccgtgcaactaggcagaacaagaattgtgagcgtaactatccaaatgagaaatcctatgcagcttccaagaagcacatatgtaaagaattatttaaaggtgataacaactcgtcttcattccagaaagaaagggataccacagctattcaaacacaagaagcaattatggagcacagatatcattcaagtaacgacctttcggaggagagcggtcatctaagaacccaagatactaacgtgaaacaaaatgagctggcaaggtatttagaggaagaatatcaagttgcaaagaacaatgtgacagaaaaagtggatgactcatcaactcgttgttctttggcactaatgg

SEQ ID NO: 3422 - DNA, 420 bp, Cyanidium caldarium
  Clone ID: LIB190-068-Q1-E1-D1
agttaccttcacttgtggttgggattgttgcgcaatgttcaagtcgctagcttttatttccatctatttgaaatatccacgctgcagtagctcggtgcaaacaaacgcagcacgaacaatatggaaacctttattatcaacgtatcaacagagactttattccggaatgtccgttgatattcggtgggtcacttacaaaaaccgaaagtcgtacacttcaagtatactaagtttcaagtcttcctattccacacaaggaggagacacggagggcaagatacctcattctaaagatatgaaaggagaacctcagtccgcttcagatgcttacgacaagacttgggctaaagaaaacttcaaagacacttctgaaaatgcagactccgacagttccaaaatttgggagttgaaactacgttt

SEQ ID NO: 3423 - DNA, 307 bp, Cyanidium caldarium
  Clone ID: LIB190-068-Q1-E1-D10
acgcgtccaccacgcgtccgtaccatcgtatttcatttcacattcttcttgtagaaaactatgaagtctttcggaattgctattgttttcctaagctttgttattgcatcttatgcagcagttgtgtccgaaatggcatccaatgagtttcaaagaggaggatacgctccttctccttccaaggaatgctgcatgaccacttgtcaatatgcagaactttgcccaatttctcaaccaacttatagccaagctccatcttacattccatctcctacctatggccaagctccgtcctacaatcaatatt

SEQ ID NO: 3424 - DNA, 348 bp, Cyanidium caldarium
  Clone ID: LIB190-068-Q1-E1-D12
atgaagatatttcagtttaacgtggatatgtaaagcagctgttcaggtggggttacttttattatactctagcagacactggaaccaattattttcgccgctttctgaatcttcctatggaaattgttccggaagctagaaatcaacctatcagattccctggtgttcgttctttgtcgtttccacaagaaggtcaaggatggagaatggatctggaagaggagacttccgacgcgaatttcgtggaagttttggtggatgaaagggatgttattgtactttagaagatggtccttaagcattgttttggcaaccataaagatttagaaacttctattaccaatcaag

SEQ ID NO: 3425 - DNA, 431 bp, Cyanidium caldarium
  Clone ID: LIB190-068-Q1-E1-D2
aggcaactgcagtggaaggaaaacaagaaacagcaaaggacaccaagttgaagaaggcctttgacctcaagtcattcttgaaggacctggcagctggaggtgtagctggggcaatctccaagacggcggtcgcccctattgaaagagtgaagttgctacttcaagtgcagtattcaaatccgcaaatcccggaggagaaacgttataaaggcatcatcgactgttttacaagagttccaaaggaacaagggtttatttctttctggagagggaacatggcaaacgtcatccgttactttcctacgcaggcccttaactttgctttcaaggacaagtacaacgccatattcttggaaggagttgacaagaataagcagttttggaggtatttcgttggcaatcttgctgcatggggtgcagctggtgggact

SEQ ID NO: 3426 - DNA, 426 bp, Cyanidium caldarium
  Clone ID: LIB190-068-Q1-E1-D4
aatcagggaattttgtccgagagttgtagtctccgtcatgtcttcctgtcctccagcagcttctttctttggttatattggtgctgcaagtgcccttgtattttcaaatttgggtgcagcttatggtacagcaaagagtggtgttggcgttgcttcgatgggtgttatgagaccggaacttgttatgcgatctataattcctgtagtaatggctggtgtgctaggtatctacggtctcatcgttgctgttattttggttggacaaattgccgaaacgaactatccatattttcttggctttgcacaccttgcttctggactagcacacggtctcagcggtctggcggctggaatttgtattggtatagttggcgacgcacgcgtccgagctacagctcagcagccaaaactctttgttggaatgat

SEQ ID NO: 3427 - DNA, 424 bp, Cyanidium caldarium
  Clone ID: LIB190-068-Q1-E1-D5
acgtatttcatcaattctttgaaggatttgctgtcggtactactgtttccgaagcccagtttggcacttggaccactatagtaatggtactttgctattctttggaaactccaatcggtatatctattggtattggtattgcacacacttatcaggaaaactcctcggcatctttgttaacgagaggcattttggatgccatctccggtggaattttaatatacacaggattggtggagttgttgacttattggcttacgcgcaactcgaactttttaagacgcaaagccatacctatttttagtattgtgggatttgtctggttaggagccatctgcatggcgattatcggagcgtgggccttagaataaaatttgtttgagacgtcgtggtgcacatgactcgcatgtttggtagttggttc

SEQ ID NO: 3428 - DNA, 429 bp, Cyanidium caldarium
  Clone ID: LIB190-068-Q1-E1-D6
acccacgcgtccgtgtttttggttgtgttgctgtagggcaaatatgagttcctttgatccggacaagttcaaacaagaacaaaaagctcgctggaatcaaggagctttatccacgtggaccctgtggaaaaaaactcaagtagaagatactccagcaaagttcttcctaggcctagtacctattcgaccaggagtgaaaatcttagaccttgcctgtggtagtggggaaacctcccttcaagttgctcacctagtttccagccacttaaaggatgaagccaaagacgcaaagatagtttgcgttgatatttcggacgaaatgcttaaagttctcaaccaaagagcacaggaaatggggctagcaaatatggtggaaacccgctgtgaggacgccgagaaggtcgactttggtgcgcactattttgatat

SEQ ID NO: 3429 - DNA, 415 bp, Cyanidium caldarium
  Clone ID: LIB190-068-Q1-E1-E1
aagtatccagaactttatttgcaactcatgacaattcacagccacgccaaggagacaaggcgcttccaaacaggcgaaaacaaagcaaccgtagaagcaaaactactggaaatgctacagagcaaaagagtcctttttggtggccatttaagttttaatattgttattctagttttgtcgacgaagttccttaattacggaggcaagagcgtaggggtcgaagccttgttctaacaactctatcgccacttgtagagtttctctgtctagtcccgtttccaaaagtctcgctatttcgtacgaaactaaagactcatgaatttttttttcttataggatataatgccttactttctaatatttcgtttttcttttcctctcgttgctcaaaagacaattcgcgtgtctccaattt

SEQ ID NO: 3430 - DNA, 171 bp, Cyanidium caldarium
  Clone ID: LIB190-068-Q1-E1-E12
aagattccgctggcacgtataccagatgagatgtgagtccagcagagccatgcaaagtgaatggcgctgcagttacatccaaaatgtaagagatgaatttgtgcagaagagagggccaaagtgtgtcaagtcttaccataatgggatatgttttattcaaaagctctccag

SEQ ID NO: 3431 - DNA, 411 bp, Cyanidium caldarium
  Clone ID: LIB190-068-Q1-E1-E2
acggacgcgtgggccgaacaatggatacctacttagggttacaggagaaacagtaccacgtgctttgattaatatgcacagtccatttctagatgttaactgctacagtctagttgtagacaatcttttcagcactcgctgactcatagtatatttgcaatcttttatcgactccacctgacctcccgaggttctgcagaggttaccctttttatcgaaacaaaatgatttttcgagtagtgaatgggcattttaactgtttctgttgatagacttgagtgttgaaagattccgcagtttgtcttattagatacagcttgacaattttgccggaagtctcaatacgtttcaatgttatcgactacaatatcaatttatcgtgagatggtatgtaaaacccagtgtttttta

SEQ ID NO: 3432 - DNA, 253 bp, Cyanidium caldarium
  Clone ID: LIB190-068-Q1-E1-E3
aaccacgcgtccggaacaagttttatcgttgctggcagtatatatcttcatcgatggatgtatatatcccaaattttgtttctcttaaatactgtgcatcgatatacttggttcgtatgattggatatagttgctttgttttgctacaaaatacggagagaataaataatagatgtgatttccaataaaaaaaaaaaaaaaaaaaaaaaaaaaaaaaaaaaaaaaaaaaaaaaaacaaaaaaggaagaagatc

SEQ ID NO: 3433 - DNA, 379 bp, Cyanidium caldarium
  Clone ID: LIB190-068-Q1-E1-E5
aaagcagcattaccgaggactggctagaagaacttgaacgagttaattgaccttatggtcctaccaatacgattgttcaagtctttcatgaccgtcaagttattcatcgagaattgattcagcaagttcatcatcctagtgcaagtcatattccactgactgggtttgctgcagtctattaccgtaataaatctagtattcgactagcagctcgtctttcaggtcaatatacgattcaagttttgagcatttggctaaccaccgcataaatgatatgattggaataagaacgaattcctcaatgttaaaatgttgtcacgttgtaggaaatatatttacacaatagaatactgctctcctcattggacgactttgtatt

SEQ ID NO: 3434 - DNA, 383 bp, Cyanidium caldarium
  Clone ID: LIB190-068-Q1-E1-E9
aattagttgggcgcttgtggtggtgtgttggctggcaaatgagcaaattggcagagttttgtcaaaaagtaccaggactccgtggactgtacaactttttagctcgcgtgcagataagaggtgtagaaagagaattgcgcaagtactgactgagatacgatgaccttctcaacgagcaagatccggatgtgaaaaaagctcttgaaatgctcccggaacatgagaagcagttgagagccaagcgttttattcgagcgtttgatttgtccatgaagaagactcacttatccgatgaaataacacaaaaggaagatatttggaacccatatttgagaagtcgcatcaagctgattcgtaaaaaaaagcatccaaattgagactta

SEQ ID NO: 3435 - DNA, 428 bp, Cyanidium caldarium
  Clone ID: LIB190-068-Q1-E1-F1
agataagtctgtcaagttgtggaacattcaaaatggtcaagaggagaggacattgaattgttcaggtcataagaaaggaaatggtgatggaataacttctgtttcatttagtcctcgttctccttatcgtattgcaactggttcgttggaaaagacagtgagagtattcgatgtagagaccggtgaacttttgcacaattttcgtcaacatgcagattctgtatattctgttgccttttcgagcgatggaagatatctgttatcaggttcacttgataagaatgttatattatgggatcttgcagctccttctccaaataactatacaattttcaaaggccatactgactttgttttgtctgtcgcatttagcttagacggtcgtcttctcttgagtggcagcaaaaaccgtactgtaactttctggg

SEQ ID NO: 3436 - DNA, 406 bp, Cyanidium caldarium
  Clone ID: LIB190-068-Q1-E1-F12
aacaacgcgtccgcccacgcgtccgggcgacagtagaggaacggtttctacgtatacttgtacgaaccaggactgtagtaactggcttgagcaaggtgtttgttcaagtatagttattgtagttgtagagggttgttgaaataaaggggaggagttgtgagacttaaattcctatcaaccgtaaccgagggaggaaggtgtctttctgacagtggacttcagtggccgcaggtaaggagagttgacagggaagttggagttaagtagcgcagtgtttcaagttttcgggttggtttcgtacaagtaacggcactgctcgtacaatgggaattcctctgacctgtcatggccaagtacaagcgccgaaaaagggaacaagcttatatgtggagttgtgggtcacaga

SEQ ID NO: 3437 - DNA, 401 bp, Cyanidium caldarium
  unsure at all n locations
  Clone ID: LIB190-068-Q1-E1-F3
aattattttcaatctcacatgctttttgtggcttactggaagaatattcaaccaaaacaatcaagttttgtgtttccttgttgtactagatgtgtaaacaataccagtttctttcgtttgtttttcaagacccgtccaactagtgttaagtcactgtcgttactggcggtagggacaggttggaatagaaggtctttgctcaagaccatctcctgtcttgctgcttttcccgtttttcgtatttttcctgttcagtcagcgaataatgaagaaattgtccttcccgatggagtccgtttttggttggtgaaaaaaggtatcggaaaagcatatcctgctgtanggtaagaagatatctattacgttttcctgagatatcaagtgtacacagcgaacttgtt

SEQ ID NO: 3438 - DNA, 366 bp, Cyanidium caldarium
  Clone ID: LIB190-068-Q1-E1-G1
aagagtagtacagtagttttacacgattggaagaccatgaaaccccagaacattgtagtaaatggttacatttaaacccataaaggacttaaaaccgggaatctgcaaggaggagacccacattggaattgccaaaaggtccaagcactaaaattcaccattggggaaaattgggcattgttcagggaattatgacccatttatgaggattggattaatcagacaaggaatttaaaggagggaattaagggaatttttggccaaaacactttccaccaccaccggtaaaacttttgttccaagcttaaaccccacaaactgggtgtaaaggtccattcttaaattaattctaaaagggaaaggaaa

SEQ ID NO: 3439 - DNA, 451 bp, Cyanidium caldarium
  unsure at all n locations
  Clone ID: LIB190-068-Q1-E1-G10
ccgggtgacgcacgcgtccagttatagccggatgcattagcctttggaaagacagctgaagaagttgagaaagaaggcaatccaaaatggttagtgcctcatatggtgtttactggaaatcgaccttcctcgtgtctcttgatgcctgtcttagacgcgtatgttacgggacaacttttggcgctttatgaacatctcacagccgtgcaaggattcctttgggagattaactcatttgatcaatttggagtataattgggaaaagtcctggcaaataaagttcgcaagcagttgaacgaaagcagatattttaataaagatatctcagggttcaatccctctactacaagtctgctcaatcgatacttggaaggttctgtangatgtgctttcgaacatgtttatcattatgagtagtttgtttcgtgttttggtggagttgattttttga

SEQ ID NO: 3440 - DNA, 388 bp, Cyanidium caldarium
  Clone ID: LIB190-068-Q1-E1-G11
aaaagacggtatcgtacctgatattattatcaatccacacgcaattcctagtcgaatgacgattggacagttgattgagtgtcttcaaggaaaagtttctgccattgctggaagagaaggagatgcaactccctttacttgggttacggtagatgaaatatctcaacagttgaaagctttgggttatcaaagtcgtggatgggaacttatgtataatggattgacaggtcgaccgttggaagcgcatatatttattggacctacttattaccaacgactaaaacatatggtcgatgataaaatacattctcgtgctcgtggccctgttcaaatactcacaagacagccggtagaaggaagagctagagaatgtggattgcgctttgga

SEQ ID NO: 3441 - DNA, 415 bp, Cyanidium caldarium
  Clone ID: LIB190-068-Q1-E1-G12
aagaaagatctgcattgattggacgagttttgccatttgtgtctttcactaattgcatgaccgttgcgtttcatagtcccttgaacaccgttattctccgtttgtgcagtagcgttagttgtggaagccccagaagcgttttgactttccagtcttcttttcactgctgaagcgtggcgcgtactttgatactgttgttcaccttggagcgcactattgaaagccacgttacatgttttgcaataagtgtcagtgtccccctctaatcgctgtgagaatggttatggaacttgttgcttttcatacttttccttttcggtaatgcgaattacatgagaagccgctccctaaaccattacctcagttctgcaaacggaaccaacttacaaaacttacagctcgattgaaagttttt

SEQ ID NO: 3442 - DNA, 396 bp, Cyanidium caldarium
  Clone ID: LIB190-068-Q1-E1-G2
acagtttatggatgaaacggaacgttccttacatgatgctattatgattgttaagcgtacgttgaagcattccaaggctgttcccggtggtggtgctgtagaaatggagctttctaaacgtcttcgagaatacgccagaactattcatggcaagtcgcaactgttaatctcgacttttgcaaagtcgctagaaattattccacgaacgttgtgtgagaatgcacggttggatgcaacagacattctgaacaaacttcgagcgagacacgcgaacaatcttccctatgtaggcattgatttgagcaacggcgaaatatgtgacacgtggaaaagtctcgtgtgggaaccttcactactgaagtcgaatgttttatccgctgctacagaagctgcatg

SEQ ID NO: 3443 - DNA, 411 bp, Cyanidium caldarium
  unsure at all n locations
  Clone ID: LIB190-068-Q1-E1-G3
acccacgcgtccgaagaaaagaagagaaaagccgtactgaagaccgacacaggtactcgaggagaaaggagacccaaattaaggtgagagaatggacgataaggaactaggcaaaaggatatggtatctgcggtagaacatatgaaagaagcagcaccgactgtttagcaaaaacacagcactctgcagaaaagagaaaatgtaaagtatagagtgtgcggcctgccaaatagtagagaagaaatcgatgaaagtgaaagcgagtaaaagatgaggtatagagaatggcggtcctaacagtaaggatccaaaggtagcgaagtaaatagacgtttgaaaagcgttcagtatganaggagaaacgagtgtagcactgtctagtcgtccaactcaacgaaacaacaataactg

SEQ ID NO: 3444 - DNA, 421 bp, Cyanidium caldarium
  Clone ID: LIB190-068-Q1-E1-G4
aatgaaattgccaatcgtgacttggaaattcgaggtcctggaagtttgattggaatagaacaaagtggagatgttggctctattggctttgaaatgtatatgaatatattaaaacagactttggatcgacttggaggaaagaagattcctgttttgaaagaatgtgaagtagatgttgccataccaagttatataccagagtcttatatcaagatagaatctgaaagaatggcagcttatcgaacgttgagtcgagtcaccagtttgaaagaaatagattggatatccgatagttggaaatacaaatatggcgacttgcctctctctgtttcttttctacttgaaataaccaaaatccaattgttggctacaaaggttggtatatctgcaatacaaatagaagaagagtttgtgcaactta

SEQ ID NO: 3445 - DNA, 446 bp, Cyanidium caldarium
  Clone ID: LIB190-068-Q1-E1-G8
ccgacccacgcatccatggacagattatgtagcgactcggtggtatcgggcaccagaactaatcatgtcctactacacacattattctacagccatagatatgtggagtgctggttgtatatttgctgaaatgctcaatcatggaagaccgctgtttccaggaatgaatggtttccatcagttagacctcattacgaagatattaggaactccttcaccagaagatttgcaacatgtaaggaaccccaagacgaagcagtatttgcagtctcttcctagaagagcacgaaaacctttttcggaaatattcgtgggtgcggatccccgtgctttggcgttactggaacgtttacttcagtttgatcccacgaagagaccttgtgcgaaagaagcattgcaagatatttatttccgtgatttgtatgaggccgactgtgaacttgttg

SEQ ID NO: 3446 - DNA, 376 bp, Cyanidium caldarium
  Clone ID: LIB190-068-Q1-E1-H1
aaaaaatctgaacgagctcatcttttggttccacagacatgtcgaacgacaatcagtctgataagagcactttgaaagaagcggacgagaagctgcagagtgcagttcatagtggaacagagaaagtttctcaggtgttgagcgacgtcaaggaaactgtgacggagaaatacaaggaatggacagcaccaaaaagtagccaagaagaagcacaagaacaagcacaagaagcgaaagaagaggctaataaagcttttaatgctatgacagacagtgcgagtgccgcttcagaggctgcatcagagaaagcagaaaaaattaagcaggagttgaacgagtgaagatacacagtagttttctcctataatgttcttag

SEQ ID NO: 3447 - DNA, 419 bp, Cyanidium caldarium
  Clone ID: LIB190-068-Q1-E1-H2
agtgaaatgaaaaacggttgtccttgatgaaaaagtgtcaacttccggttctccctgaagacgttgaatctcaaattctggaattattagagtatgtaaaggatgttgctgttgctagaatggtttgtaagcgatggaagagactcgtggatgaaaattcccaattgtggagacgacttcaaggctttacactaccaaaacgactgccaagtgaagcggaaaagtggtatagaaaggcagcggaatgtgggaatcgagaggcaatggtgcttcttgccttgctctattattatggatatcagagtcaggatgccacagttttgtctttgacgtttcttcgaaatagtgtcgcttgttagtgcaacgagcactagtgtcgttgttgaggtatttataaataaataaatttgtccttggtg

SEQ ID NO: 3448 - DNA, 107 bp, Cyanidium caldarium
  Clone ID: LIB190-068-Q1-E1-H4
atgatgataagaacaagaaagctggaggtgcctaaatcgtgagtgtttgggaatttgtcttgtttgtttgttgtagtaccgcgcacctagtaaagatatatacatgt

SEQ ID NO: 3449 - DNA, 426 bp, Cyanidium caldarium
  unsure at all n locations
  Clone ID: LIB190-068-Q1-E1-H5
agagaatgctgggtggagtagcgaaacaagagaagggaagtaaaaggtaagaaagaggaaaggtttacgagagaaggaagtagaaagaagagagtgtaaggcggcgtcataatagaaatccgaaaggagtagaagaaaagagagagaagaaagaaaagaagagaaaagccgtactgaagaccgacacaggtactcgaggagaaaggagacccaaattaaggtgagagaatggacgataaggaactaggcaaaaggatatggtatctgcggtagaacatatgaaagaagcagcaccgactgtttagcaaaaacacagcactctgcagaaaagagaaaatgtaaagtatagagtgtgcggcctgccaaatagtagagaagaaatcgatgaaagtgaaagcgagtanaagatgaggtatanagaatggc

SEQ ID NO: 3450 - DNA, 427 bp, Cyanidium caldarium
  Clone ID: LIB190-068-Q1-E1-H7
tgaattggagaagatatcttccttagatacttggaagcttgtgcttggtacaagacaaagagtggataatatgttacagcgagtacacaagctgacgagtatcttgtcctttttatactcgggcgaacaaccgagagtggactatatcgttgctgaggatgaagcaagttgggaaaagttgtggagaggaaaacgcgaggtcattggatatactttggaagcagctttacagaaaacttgtattgtggaaaaccaattgagggagtggaaaaagaaactcgatagtctagcagacaattattcgttgggtacgagagcctatgatgcgagaatgtggtcattggacctcatcgcaactattatgagtgtctgttttgcagtttttggaatgtttcacaattctttggttattatgtccaattgccca

SEQ ID NO: 3451 - DNA, 417 bp, Cyanidium caldarium
  Clone ID: LIB190-068-Q1-E1-H9
gaaagttccaagtcttcctcgatcgaaagtgactcggaagaactagaatgacattacggatatcgtataatgaaagtaagtgtatgcagttggttattgatatgtaagagtagagcagccttagttgatagagaacggtcctgggatgagagcaggactgagagtgtatgaagactttattattgctgtggatggcttgattgtcgaggaagacgaagatgagatatctgaatatttaaagaagaaaacaggacaatatgtcaagctagtggtttggaactgtctggatgaagaggaaagagaggtttccttgttggtcaacgagccaactaaggagagtggttagttgggagtgattgtacgatatgagtcacttttccacgctacagaatatgtctggcaatgtataagtgtcgt

SEQ ID NO: 3452 - DNA, 152 bp, Cyanidium caldarium
  Clone ID: LIB190-069-Q1-E1-A10
tcgagccacgcgtcagcttcatcttaacggtacaacaagtgtattttgttactgcgttttgtacggtatgcttcctattaaattgcatctgtgtgttcagctcgtgctcgaattttgtggtatgctacggtagcctctcgtagtctgaggtc

SEQ ID NO: 3453 - DNA, 244 bp, Cyanidium caldarium
  Clone ID: LIB190-069-Q1-E1-A2
aggcagatattaccgaaatatgccagagagcttgtaaacttgcaattagagaatcgattcagaaggaaattgagcttcaaaaacaaagagaggtcaatccagactctatggaagaagaagttgatcccgttctcatgttgacgaggaagcacgttgaatgagagtatgaagtttgcaagacgttccgttaaccgatgcggatgtgcgtcgctatgagatgtacgcgcaaaacatccaagctacg

SEQ ID NO: 3454 - DNA, 138 bp, Cyanidium caldarium
  Clone ID: LIB190-069-Q1-E1-A3
gtcagggattagaacatgcctgcgagtagaaagagatgtagcgctatatttctacctagtgcaagcgaagaagtctgaaatacgacttgtagactgatcgttttctttttgccaatggtgaaaagagtgtaactcgct

SEQ ID NO: 3455 - DNA, 305 bp, Cyanidium caldarium
  Clone ID: LIB190-069-Q1-E1-A4
agcccacgcgtccgcccacgcgtccgggaaaaaaaaaggcgcgacgacgcatgctcaacgtgttgtctactgctcgtcatttcgtagcggtggtcggctttttacgacgacgacgacatggtggttgcttcctgtcgaaacctttttgtactagagttgaagaacaaggaaaacttatagtatccgaaaccgaagatgatacccgattagatcgtttcttgaaacgccgtattggtaaattgcctcagtcttaattagaaaattatatccgaaaaggatttgtaaggataaatgggcaattatta

SEQ ID NO: 3456 - DNA, 122 bp, Cyanidium caldarium
  Clone ID: LIB190-069-Q1-E1-A8
cggcccgacccacgcgtcagaagtcacagcaagaacgtgactgggttttgtctcagtttcgctctggtaagcaaccgttgatggttgctaccgacgtagctgcgacaggtttgggtaagtat

SEQ ID NO: 3457 - DNA, 416 bp, Cyanidium caldarium
  Clone ID: LIB190-069-Q1-E1-A9
agcccacgcgtccgcccacgcgtccgcaaaaatatgagcaagttgacgttaacattcttcttgttacttggcattgcagtgtatgctattgcaggacctttgaaagattctaccgtagcctcaaaagtcagaggatatagtagtgcttatactccaacttattcatctccttatgaggcatcatatcctacttatactacttatccatggataaagccttgtgctgaagcttgtgccggatgcctctattgctatcaacaatacaatttttattatccttatgggcttgatatcctgtactgcaacaactttgacaaatattgtccagctggatatgttcgaccatctccttatgaatattcttcttattctcgtggagcatatacttcatcttcttcctatgcgactccaaccta

SEQ ID NO: 3458 - DNA, 419 bp, Cyanidium caldarium
  Clone ID: LIB190-069-Q1-E1-B11
acgaggattctgtgacgtatcctagaggcatcacggccagaggatataactcagttatatgaagttcttagacatcgagtgcctaagcgagctccaaaggaagcttaatgacctcgaattaacggactatcgtgttcgttgtcaattggaagcttattcctgtaaacccgcaggttttgacaaaaaattgagcaaatcgttggagcaaaggttgttggaacaacttgaagcttctccaagggcattccaagcgtctcccgtgggctctttagaagaccaaagtgcccgcaagacattaatcaacctcatttgcacactgaacgctgcgcaccaggattacgactttagctcgctgcagctttcaagactgaaacgtgtccaagatgtacacgcacttcagcagcacgtcgactcgctgt

SEQ ID NO: 3459 - DNA, 264 bp, Cyanidium caldarium
  Clone ID: LIB190-069-Q1-E1-B8
aggccaagtcaccagccaccgttctcgtgtgatgttcgcaagcaaagcaaaagagtggcgaaaacaccccgacataagtccgtggacaaactttaaggcttgctttactggttttggaacagctttggcactttttaccggttatgttgttttagaacaggcttattactatttttacaagcctacacagacgcaagtccccgagacgaaatcggaagaacttggctcctgagtttcgtgttcttgtaaagttgggacctcacg

SEQ ID NO: 3460 - DNA, 414 bp, Cyanidium caldarium
  Clone ID: LIB190-069-Q1-E1-B9
gcgtcagcccaaacgtccgcccacgcgtccgcaagtagccaatcgacaacgaatactttcttgcaaacattttcggtatattatgtggaaggaatgctcacaaagcttgaaagccttgttgctttcctcgttgtacaggtcattttctttggagattgcggagacactagaacaaagaaacattttcaccggcaccaagcctttgttatttttggcaaagatttcagaggatggtaagtattttatggtggtgtatatatctatctatttatatgtatgggatgattgactatcgtcgtgggtacgaatttcacaatggcaagtttggtttttggcgtcgaacgattccaggtcatgtcgttattttctcgttcatttgcagcacagtattttggatatgctcgctcatgtaag

SEQ ID NO: 3461 - DNA, 253 bp, Cyanidium caldarium
  Clone ID: LIB190-069-Q1-E1-C1
cgcgtcagaccaaaattacacaccgcgtgtgggtgaccgtgtctgacatggacgcagaccagtacagtaaacagccatacttttggccaaacatgttgctacacggagatcaagattcaattttggattctattccgttatcaatgcgataagcacagtgaaacgaacgatataaactgtctgatcagttggtaactgttttaaaatatatctcccgatacatctcccgtggcgtcactagtcgatgcatgtc

SEQ ID NO: 3462 - DNA, 446 bp, Cyanidium caldarium
  Clone ID: LIB190-069-Q1-E1-C10
aatttacgggctcgagcacgcgtcagttgtgtcgtttcaaaaggctccattgtgggtccatcggttttggttgactccaagacacatatgcctaagaactcacggcttgttcgtagcaatctactatccttttcgaatgaaatggaagacttgaatatagattctagtgttgcagtttctagggaaaagcaagttggaagtgcttcttcctactctttatggcaagaaacacttgatgaaacagcacaacaacaagacagcgaatcgtccgtggatgaattggaacaaatagatagaaaggaatcggaagatattgcagtagtggagaatagagaggaagttagtgccacacctgattcattatctttcaaatcttcttccagttcttcacctccaatggaaagaaaagttgctcttcaagagataaaagatactttccaacgagc

SEQ ID NO: 3463 - DNA, 145 bp, Cyanidium caldarium
  Clone ID: LIB190-069-Q1-E1-C12
cgacgcacgcgtaagcccacacgtccgccagccgtccgcccacgcgtccgtgtgtttccttgtaagaataggagaacaaccttgaaaaatagctttgtagagagaagagtttgtttttcagtaaagcatattggtactttacatc

SEQ ID NO: 3464 - DNA, 205 bp, Cyanidium caldarium
  Clone ID: LIB190-069-Q1-E1-C2
gcgtaagcccacgcgtccgcccacgcgtccgcggacgcgtgggttggtcagaatcttggagtaagcacaggatcgacattccgtacgttgtttgctgctctcgtatctcatcaattctttgaaggatttgctgtccgtactagtgtttccgaagcacactttggcacgtggaccactatagtaatggtactttgctagtctttgg

SEQ ID NO: 3465 - DNA, 399 bp, Cyanidium caldarium
  Clone ID: LIB190-069-Q1-E1-C4
cgcgtcagcccaagcgtccgtgcaccttaccatggacacgaatctcaagaatacttacgctgctggtgactgttgtcgagtaagctgatagcaattggtccaagagttggtgtaacacgcgtatttgctctcaatggccgatatagtgagatatttcggcgttggcattacttgacaatggcttgcaatatgtccgacttgatggaaagttgacttgtaggcaaagatcgaaagtcttgtctagtttcaggttggactagtcagatcgcatgagtactgcaaacattttgcttgtctctttgaaggctggtggagttggtttaaatcttacctctgcaagtcaggtgtttatattggacccattgtggaatcctgcagtggaagaacaagctatcgata

SEQ ID NO: 3466 - DNA, 413 bp, Cyanidium caldarium
  Clone ID: LIB190-069-Q1-E1-D11
cccacgcgtccgagcaagcgtgaaccgtgagggtagttcatcatggttgagacaaaacttcaagatggtgttagtgcttctctttggactgttcgtctcttcctctacacagttattttagcattctctgccactatcattggcttggatggacgtaaagcagacaacatatggaacgacagcttattctatgatgggaagtacattaacttttgtgcttattctgcctcttctgttgtagaaggaggggaccatggagcgtgtaaatatgtcatggcgttggcgtctataagtttgattctagtctttttcttgtggctttttacatttgtagatgcgttgtatcctattcttaccaagttttggtttattgaattgggtatcaacgtgtttcaaacaatgtggtggttggt

SEQ ID NO: 3467 - DNA, 205 bp, Cyanidium caldarium
  Clone ID: LIB190-069-Q1-E1-D2
cgcgtcacgattcactgccatttacttgatggacagaatgggaagaagagtgctgtggttaactttattaccaggagtgctcgttggatgtttcattataggctttagtttccggagctagcatcatccatggtccacgaacgaatttacattgggggtaccaatacataatacatgttttgcggttctggtacgcgaccccatg

SEQ ID NO: 3468 - DNA, 412 bp, Cyanidium caldarium
  Clone ID: LIB190-069-Q1-E1-D5
cccacgcgtccgcccacgcgtccgagctacttcaactgtccaaagtgtttcagacttttacagaaaaacaattttcctctagcgtctccaagttccagcttcccgatctaccctatgactatggcgagttggaaccttacatcagtgcagaaatcatgagacttcaccaccaaaaaacaccaccaaacctatgtcaacaacttgaatgtcgcattggaaaagatccacaaggcagaagaagctggtaacgtgggtgatatgatcgcgctgcaaaagatgctcaaatttaatggaggaggtcacgtcaatcactccattctttggcacaacttggctcccgtgaataaagggggaaggtactccccccgatggaccattcttaaaaccagtggaaaaagaattcggctcattg

SEQ ID NO: 3469 - DNA, 165 bp, Cyanidium caldarium
  Clone ID: LIB190-069-Q1-E1-D8
ctcgacgcaagcgtacacatcaggttaggatactcgctgaacttatgcatatcattaatcggaggaacagataccaactggaattcccctagtagcggcgagcgatgcgggaagaggccactatgagaatcctctttttcgttttgagaatagaggagatgtatt

SEQ ID NO: 3470 - DNA, 278 bp, Cyanidium caldarium
  Clone ID: LIB190-069-Q1-E1-E1
cacgcgtcacgcccaagcgtccgcccacgcgtccgggatgccatccttattggtacaagtagcctattgtattcatgatgtgccacctatatctacctgtgtacgcactaagttctccgagttttggagaagtcatcacgaggaatggcccaagcaaaagcacatgttgcaagccgatcaaagacaaccgttgaatgaattgctcatccgaccaagttaatacagcttgaatcgatgccctcctccataaaacccatctcgtggcatttttttttaat

SEQ ID NO: 3471 - DNA, 240 bp, Cyanidium caldarium
  unsure at all n locations
  Clone ID: LIB190-069-Q1-E1-E2
cacgcgtcagaatgaangagaaatggaatatgacaaaagaatgtcgtcagaggaggaacaagtggaaacctctacttttgaactttcgagagaagccgaggaagcagcgataaaagcaagaaacttaacggaaaggattgaaaagtttttctcgaagagttaccagagcgagaagagagatatcgaaaaaatggcttcagacaacgatggagtgactaacttcgatgaatcctaatggtt

SEQ ID NO: 3472 - DNA, 253 bp, Cyanidium caldarium
  Clone ID: LIB190-069-Q1-E1-E3
cccaagcgtccggcattataggagtgattggagatatggatagttatcagttgccagatgccaagggctttaccaatttgataaggtatcttggaggtgtaacgcacgagagaatacaggaaagaagggaccaagtcttgagttgtaccaacaaagacttggtagactttgggtcggtattgggaagtgttgcttccaatggtagcatacttgccgtaggtagtgaacaatctttataacaagccaatgcaca

SEQ ID NO: 3473 - DNA, 385 bp, Cyanidium caldarium
  Clone ID: LIB190-069-Q1-E1-E9
gcacgcgtcaggacaaacatttgtcgatcaaaatgcttcaagttggcttttcctagaaatattcgatctcatatgatatacagtgctagtgaatcgagtacggatagtgatatcgaattgatatcttattccgataataaaccatggaatacgagtattcagcaaccacaagagagttgccccaactcttctactcgtagaatactcttaatacttgtgggtatatcagtgctctggcaagacatgattatacatggaattggtaagtaaatgatggtacaaagtgtgtcaggatgaattgcatactcctctgcaatgtgaaaactatgctatcgagtaattgtctcaaaacaagcctaatgttgtgggtagatgtaacgttaca

SEQ ID NO: 3474 - DNA, 417 bp, Cyanidium caldarium
  Clone ID: LIB190-069-Q1-E1-F11
agcaaaatcccgaagggtgggattgttgttgtctccagcagcccgtttgcgtctgtcttcaaagtatacaatttctttggttgttatatttgtgtatataaacttggaatgggaacaaagaaacaacatattatgagcgtttgtaggtacgagagaaaaaagggtgtcttcaactgtttattttcgatgaccacgctgcaaccgtacgtatgtagtgtaaacgcggtagttttgtagtgttttgtgttctgtgaagcctgtctcattacaaaaagtaacgagatacgtggatttgtaataatattagcattgttcaaggaaacttcactgttactctgaacaagtggttatagttttcgacttgtcagggaaaaggcaacagcctgacagttataagttggaggcgtcaccagtaaa

SEQ ID NO: 3475 - DNA, 403 bp, Cyanidium caldarium
  Clone ID: LIB190-069-Q1-E1-F2
agcggacgcgtgggcggacgcgtgggaacttgttctgcatgagaattccgaccacacggaatctgaaaccagtgctttgaatagtccagtggtttcggttccgacaaaccaccaagacaacgaccaggagcagcatgaccatccatccaaccttttctacaagttactttttggagatgcatctgatgaagaggaagagccaaagtcgatgaaagcagtttcctatgaaagtacgcatagtggaaaagattccacttcgtttctgtccgttgctacatcaacaaccgataaccggaagacgcaaatatccgatcattccattccatcctcctccaatacagatatgagcgattctaacgagaaacaacagcctattcaaagtaatgataatagtttggaagaa

SEQ ID NO: 3476 - DNA, 327 bp, Cyanidium caldarium
  Clone ID: LIB190-069-Q1-E1-F5
agcccacgcgtccgcccacgcgtccggtgggttgtggagtaagtgcgcttggcaacaaactaaaagatggcaagaagaatcatcggagcttaaatgtctgacgctactgtagcgtctctatttagtgtgaaaatgttgttctaccttacaatacttgcgttctctatcactattgtgggtcttatgggtaagagttccgacggtatttgggttcacagtgttccagcgaaagacgaatattgtgcatacaagtcttcccttcaagtaaaccaccacggcatagcttcctattgcaagtatatcatggctgtagcagctattggtttg

SEQ ID NO: 3477 - DNA, 421 bp, Cyanidium caldarium
  Clone ID: LIB190-069-Q1-E1-F9
aggaggttgcttcttggtcatccaagacgatccttgaaacattgccatcgttgttattctccgtccatccacatgtcaaatacaactcccgagaaccctagtgcagagagactactagaatgggaaagtacactagtgaaagagttgcaaacgcttcgttttccttcacccgtttcattcatctattctcctctagagtatgcgtggcctttgcacgaagaatatgttcgtcgatattatcgtccaacagcacgtgttttattcgttggaatgaatcctggaccttttggaatggtccaaagcgggattccttttggtgatgttgttatcgtcaaagagtggctggatattcgtggcgatcttgtattcacagcgttacctgagcgtgtgcatcccaagcgacctattttaggactgcatt

SEQ ID NO: 3478 - DNA, 412 bp, Cyanidium caldarium
  Clone ID: LIB190-069-Q1-E1-G1
agaaagccaagtgaggaaaagaaggcaagtagagggcggcccgagaaaggagagggcgtaagacgtgatacagagtaggaagaaaagagaagagagctagaaaggaggtaaaagaagagtaaaaggactagaagaggtacggaattcacgaggaaggagcgtgaaggaaggaggaatcccaagttatcgaggaagaaaaagcttcggtgaaagcgtgaacggattttgtacacactgcccgtcaagttctggaagtgtgctaggaataagcacgagaagtagaagagagtaggaaaagaagaaaggaagtgaagacgtaagacgtgaaaaaaaagcgtaagacgtgatacagagtaggaagaaaagagaagagagctagaaacgacgtaaaagaagagtaaaaggactacaa

SEQ ID NO: 3479 - DNA, 364 bp, Cyanidium caldarium
  unsure at all n locations
  Clone ID: LIB190-069-Q1-E1-G10
aggagagacagacagatggccaacgctggtcaagatggccttgtgcaagtcaacaaacatagaaaagtaaagagattgcaagaagataatattttgaatagagcactatcacaaccaggagatgtatttctgtgcttttgcaacatccagttgttggtgaatgcagaaagagctattataggaaatattacttgtccagaaagtatcgaattgtgtcgtctattagctggacatatagcagtttggttcgatgaacatttggatgactttcgtttggaagctatcttgggagcactattgtgtacttgttattgtgagtggaagcgttttgaaggagaattggnggtacaagaatggaatgaat

SEQ ID NO: 3480 - DNA, 413 bp, Cyanidium caldarium
  Clone ID: LIB190-069-Q1-E1-G3
ggggagggaggaggatgcaaggttggaagaaaccagtcataaccgatgcttttggaaacagagtaacttatgtgttgaaaagatatttcaacgcacctactactggagaagagttgccacattcgttgggtggtcatgtgaccgatgcagatacgttgttacggcacaaagggctgggagaagaaacagcgtattttctgaaagaagacgctcgcaagtttgaaaagttggcaaaacagttgaaaagtgcgttgaattcacggaaactaatgacaaaagaacaactcaaagtggccatggaacagagaggaatacaagtatctgaagagggtttagaggacttgcttcgtccaaaagagcacattcgaatctcggatgcaagtagcagtggtacgtaagaacaagctaaagac

SEQ ID NO: 3481 - DNA, 400 bp, Cyanidium caldarium
  Clone ID: LIB190-069-Q1-E1-G5
ccttgtcgacagtgtgaagcttgcagaaagttgaccaactttgccagggtttcgcactatgctcggtcaaaacttcttttgagaagaaaccaaatattgagaactaaagtcccgtggttacttttatgtagttcgataaagtcttcggatttgagaaaggcagacagagtttgtttttttgtagctgacgcagctattttgtcaagtagcactagaaatgagttactgactgcctttgaaagtctttcttgtttgaaaagcacctttggaaggttccattatttcgtcgtatccgatgacagtttggaggaggtggaaagacatatttccttgtcagctggacaagggtttaaaacggaagttttgatcactcctggaggagctcaagttttccaacttg

SEQ ID NO: 3482 - DNA, 280 bp, Cyanidium caldarium
  Clone ID: LIB190-069-Q1-E1-G6
cggctcgacccacgcctacagtgagattcgggatagactggaaattatggcaaaaccacgtgccaacagcagcggtaaaaagatgtgtagcaatcggtagagtcaaaagaactgtagtgtaaacagacgagtacatacagtaacgtgtcaagaaggaacaggaaagcgagagatcagacagacaagggattaaaatgcaagagatccactacaggaataagcattgaaagattagatatgacatacacatctaaattgacgcgagaatacactatgaatg

SEQ ID NO: 3483 - DNA, 405 bp, Cyanidium caldarium
  Clone ID: LIB190-069-Q1-E1-G7
aagaaagaggcaaatacgggaaagcagtaaaagaagaaagagaaaggaaaaaactgagtatcaggaagaaaagagggagtagatgaggaaagaaagatcaaagaagtaagagtaagaaaaagagtaatgtaaatgaaagcaggaaagtattgaaaaaagagaatgtaaagcgcctaacttttgcaaaaatgttccaaccagtgaaagaagaagcaaaaagaaagaaaaagaagttaccacgtaagacccgaagctaattgatcctaagctgtccaagcgaagtaaggctgaaccaatatctgtggaaaaagatttggaagagatagcataagggggtaaaggccaatcaaagctaatgatacctggtactcctcgaaagctatataagtatcgtatgcacgaaag

SEQ ID NO: 3484 - DNA, 252 bp, Cyanidium caldarium
  Clone ID: LIB190-069-Q1-E1-G9
agcccacgcgtccgagtgggtattgcgactcacaggcctggatggaatttgtcgatcattgtctttgggaatctagggattctcatacagcagacagtttagtcgaatttgtgtcttctgtatgtcttccctgagacttgtcagttctttaacaatagaacctcctattctttcaggctttttcaattctttcaatatgatattttaaaaaaaaaaaaaaaaaaaaaaaaaaaaaaaaggcggaagaacaaa

SEQ ID NO: 3485 - DNA, 269 bp, Cyanidium caldarium
  Clone ID: LIB190-069-Q1-E1-H1
agcccacgcgtccgtttgttctgaatcaaggagaagtttgtacttgtccatcgagagctcttgttcacgagtccatttacgacaagtttatcgaaaaggtgattcaaagacttggtaaaataaagcaaggagatccactcaatttggagactatggtgggagctcaagtatctactgaacagatggataagattcttcactatgtggaattgggaaagaaggaaggtgctcagtgtattgttggaggaagtggaaagaaagccattgga

SEQ ID NO: 3486 - DNA, 430 bp, Cyanidium caldarium
  unsure at all n locations
  Clone ID: LIB190-069-Q1-E1-H12
gcgtaagtgacaataatgttgggtctttggtcgttattgatgtagacgatgatggtgttagtggaaggcctttgggtattgtgacagaaagagattatcttagaaagatagtacttttgggacgctcatccaagacaacttatgtaaaggatatcatgacgtctgccaatgatctaattagtgtcaacccttcagcttctcttagcgaatgtatggaaataatgactcagaaaagaattcgtcacattccggtaatagatagtgaaggcaatgtgaagggaatggtatccatangagatatcgttagagaactagtcgaagaacaacgacatgaagcgaagaaactgaatgaatacattcaggggacttattaagatgggctccttcgaggcttgaagtgcttttgttgatttgtgcacagaataaacat

SEQ ID NO: 3487 - DNA, 431 bp, Cyanidium caldarium
  unsure at all n locations
  Clone ID: LIB190-069-Q1-E1-H4
gactcaagcgtacgcccacgcgtccgcccacgcgtccggagtggcagcacgtgtgatgtatatatgagaaagaaaatgatacaagagagaactatcagtggccctgtgaaagagagcactgatgctgatctcagacacacggtagcagataggtttactatagatgtatacattgggtctaggtacggcagatacgggaccttaatagtggcatccggatacatgtgcccatgtccaaatagtacatganagggtaaaatccgcttttagcgacgatacacgaaacgggtgtgttagatcaagatggccaagatgtaccacgctgagaatgaacggttttcctttgagagagtcgtgtacgatgagtgaaagtgacagcgacgagagttgtgccagtgacgacaagacgatgaaaccttgcaccaagagac

SEQ ID NO: 3488 - DNA, 244 bp, Cyanidium caldarium
  Clone ID: LIB190-069-Q1-E1-H7
acgcgtcagaccaaataacatgtcgacccaaaacgcagtaggctctcccaacttgataaggagaaatacggcttcacgcagttccggtttaactagttctggtacgagcacctcggggaagtatttttccgcgcgactgtataacgacgaagcacccggtttgagagtgggaccaacgtctgttagggtttttagctatgtctttaaagcttttgttgtagttttgcatgtgtggtccaagttt

SEQ ID NO: 3489 - DNA, 409 bp, Cyanidium caldarium
  Clone ID: LIB190-070-Q1-E1-A10
acgcgtccaagcaagcgtgaaccgtgagggtagttcatcatggttgagacaaaacttcaagatggtgttagtgcttctctttggactgttcgtctcttcctctacacagttattttagcattctctgccactatcattggcttggatggacgtaaagcagacaacatatggaacgacagcttattctatgatgggaagtacattaacttttgtgcttattctgcctcttctgttgtagaaggaggggaccatggagcgtgtaaatatgtcatggcgttggcgtctataagtttgattctagtctttttcttgtggctttttacatttgtagatgccttgtatcctattcttaccaagttttggtttattgaattgggtatcaacgtgtttcaaacaatgtggtggttgg

SEQ ID NO: 3490 - DNA, 209 bp, Cyanidium caldarium
  Clone ID: LIB190-070-Q1-E1-A11
atactaagtcgtatcatgagggtaaatcaacaaagaaaaagggcgggcgtcccaaaaaggttcaaagccttcataatggaacaggccgacgtttcaacccctccaaaactgtctaccaaacttcaattcaaaggactgccttttaaaaaggtcaagccgggaaaaacccgggggtaacccaattaaacgcccttgaagaaaatcccctt

SEQ ID NO: 3491 - DNA, 376 bp, Cyanidium caldarium
  Clone ID: LIB190-070-Q1-E1-A12
atgccaatttagaagtgttttcgaagaatggggttcgatttgagaacgatgtttacattccaacggatgagcctcatggcactattaaggcaacgttgtcaaggtcttgccttgcaaaattgtaaagaagcggaaacgagcgaacatatcacataagtgagcaacaagaacatttattctattccgtatacttcattttttttcatttgtttcggacatctcatctcttagcctacattccaatcgcaactcttgtcgaaactctgcgtactgtacgtccttttctattacgttcctttccttgtattctggagttagaaaccaagtaacgatgacccccagaaacgcgactcctgtgtaaacaaactgcagattt

SEQ ID NO: 3492 - DNA, 425 bp, Cyanidium caldarium
  unsure at all n locations
  Clone ID: LIB190-070-Q1-E1-A2
agataaggagatttgttgtggtgtgactggcagtatgcagacagaagcacaggtagcggatagtgcactaacaaacataagaaagagaaacaccgatgaagaaagcggaggaggggaagaagcgagaaaggagaccacctatggtttaggtggtgcttatatggatatggcaggcgtcaatggccatggaaatccacatttacaacatgccaacttacctccagcaatgagacattttcgcaacgttgcagggaaaccggctatattggcactctctgctttttcaacgggagcttgttttcttggtattgtgaatgtangactcatttcttccgagttacttcctactgtagcacctccagcctttttttacagtggattttgtcaaattgttgctggaatcctaacttttgccaataatgaca

SEQ ID NO: 3493 - DNA, 339 bp, Cyanidium caldarium
  Clone ID: LIB190-070-Q1-E1-A4
acggacggtggggtctccaccaagagagttgcaaagaaactaatggatttactttgaaatgtcgcgaaagtgacaatacgacttgcttgagaaaaagcaagaaactgaagtccgagctttgttactactttactcggtttggtgtttgcaatgacaagcaatgtcgctttgttcacgaccccgaaaaggttttcgtatgtcgaaagtttattagcggttcatgtatcgatcccaactgcacactactgcacactacagaaaaggatacgcttcctgtgtgtttaatgttcctaagtggattatgtggaaaggagaactgtcctttcgttcacgttaatg

SEQ ID NO: 3494 - DNA, 415 bp, Cyanidium caldarium
  Clone ID: LIB190-070-Q1-E1-A9
aggcttggttagtactgaggtgagggatcactcgggaaccccaagtgccgtacgtttttgcaatttctcttgtataggaaagaaagtatctgagaagaattcaggcagcgttgaaaatttttcaagtatttcgcgagtaataatatgtgctgaaatatttttctactactagaggttctttttgcttgacgctgtttgaaaacaacggaatgaatcttgtcctgaccggtcgatatggtcaagggatgactctaacaggtatccaatgacttatgttttccatcgtatgacaagaggcttgttgggtaaaagtagcggatatgttttgtgcagattgtgtcgtgcttaagttgctcactttcctgctgaccaagaggtttgaaaacctgcagtctaaagagcaatatgttctcac

SEQ ID NO: 3495 - DNA, 350 bp, Cyanidium caldarium
  unsure at all n locations
  Clone ID: LIB190-070-Q1-E1-B1
acgcgtcgaccaagcgtcggccaaggcttcggcggacccttggccggccccttgggtcattcattcagttctgccccaaccaaccaaacaccttcaaagaaacttcaaggtgcggaaaaagccttattggtatggttttaaatagatgccgctacccatctcttttgtgagctcccttttgtagtccattctttaacaaccacggtgaaccaagcaacccattggtctgccatattatggaaggaatatgctaaagcggattcacgttggggtagatttcatgactgcacgggtggcttggnagtgcctacctctattttatggggtcctttatctttagcttgtgcgta

SEQ ID NO: 3496 - DNA, 205 bp, Cyanidium caldarium
  Clone ID: LIB190-070-Q1-E1-B11
aaggaaaaagtatttcttcaagtggcagaaagtttaaatgaaaaagtctatgtagataaaagaaagtatcgaattttgagtcatctttcgttaccagaacatatccagggtttgttaactacggaagcctgtgcttcacgcctacacgttgtggacatgagaagtgtcagttttagtggaatgaaagaaaattcccaaaaatatg

SEQ ID NO: 3497 - DNA, 390 bp, Cyanidium caldarium
  Clone ID: LIB190-070-Q1-E1-B12
aaccaggcgtccggattgtacgaatattccgacatatgtctaggtggcagctgcatctggtacgaaagcatcacagaatataattgcgagcttcaagagccaacatgattgccaagtcaagtgctgttcatcgacgcctttgtagcctctggatatttccattgttcctggtgttgtttttaccgatcctcaagttgctacagtcggaatgaccgagcagcaagccaagtatgccggcatagatactgatagtcgagtttttcatttttgtcatcttcctcgggcaattgtaaactttgatgaacgtgagtggatcaagttggtgatagataaacagagtctcttacttgttggagctacaatcgtcccaccttgtggaagagaaatgaa

SEQ ID NO: 3498 - DNA, 333 bp, Cyanidium caldarium
  unsure at all n locations
  Clone ID: LIB190-070-Q1-E1-B2
aaattatggcgtccgttacaaccaaggataatttaatttggtttgaaagttcctttcccttaaaaatccaaaccggaggaaacggttggccaaaaaaaggacacganaagtcaatttcntaaganagacgcttcaaaacaatctataagatggcgactcatctagaccctctgtattttgccacaagagtgttttacgagattgaatgggaacttgttctattcaccatagtcgctgcaccttggtgacaccaaaataaaaggacgaacaagaaattttgctatgccagaaacaagcataaaaactgagcgactggttggtaaaaacaagcac

SEQ ID NO: 3499 - DNA, 361 bp, Cyanidium caldarium
  unsure at all n locations
  Clone ID: LIB190-070-Q1-E1-B3
cccccaaaaaatgttatccggaatccatacaagttattattacaataataattatcctaaaaggaatcaacggtaataaccttgtgggttgttggaattcttattcaggtgagaaagctttaaagatagcttctgaaataagctattctttggtagaagtacctgtcatagaccccttgtttgatactcaagctaccaaacaactcgcagacaagtatggcttacgattgtcatgttctgtangattatcccaagacacagatataagtagtttggatgagtctacaaggaaacaaggagaacaagtactgatgaccgcagtggaaagagcacacgctattggctctccgatagtttgtgg

SEQ ID NO: 3500 - DNA, 152 bp, Cyanidium caldarium
  Clone ID: LIB190-070-Q1-E1-B4
ccttggttaaaattgtgttaatgaaaaattgattccggacaaacaacttaaagaaacaaggaattaccaagacctggaaaattaaaaccaattaccccaattaccaaaccatccaaaaaaattacaaaaggataagcaaaactttaaccttt

SEQ ID NO: 3501 - DNA, 392 bp, Cyanidium caldarium
  Clone ID: LIB190-070-Q1-E1-C10
acatcagtgttcgacttggcggaagaagtattgcacagtgaacaaacgtttatgagagagtgtatcacttgtttaggtcagggtaccgttgtatgttcaccttgtgatggcacgggtatattacaacagaacgaaacggaagagctttgttgttattgtatgggtagaaaaatatctctttgtgcagactgtcagggaaaagggttggtcaaaacagagttttaaggttgtttaaaaaggagaataacaatccttttggaatcggtaaacaatcgaaaactcacaagtgacttttattacaaggtgttccattccttgtcagaaaagtatttgtaagtaatttgaggttagcatcgattggcttcataagatgccatcatttcagaattttt

SEQ ID NO: 3502 - DNA, 380 bp, Cyanidium caldarium
  Clone ID: LIB190-070-Q1-E1-C12
actcctatattagctagtgcttatacgcatatagctaccgataatatgctcgatgaacttgatcgtttgaatgttcctgcaataagaataggaaagcctgtgcatatacatcgcgatttatggaaatattctttggactctattttggaaagagatgagcgagtcgtagagaagagaaccaattttaagaaagcagcagaaagacttgcgcaaccgatgcgaggaaaagcaattggattagctcatcgagactattccaaatcacttggtcaactagaacaagtagaaatgaatgtaaccaaagagatactcgagaaatatcctattgtgttgagtacttgtgttggagctggtgaagaatgtataaagaatatttcgtt

SEQ ID NO: 3503 - DNA, 389 bp, Cyanidium caldarium
  unsure at all n locations
  Clone ID: LIB190-070-Q1-E1-C3
cttcggccaagccttcggccaagccttcggccaagccttcgcaatgaaggaaattaattggttacaaaaggaattaacggaaaaacctttaacctgtttccaattgatcatggttttatcttaccagacaaatttcaaagctatccttggcctgtttggatggactggcctcaggtaaaggacccggtttgcgaagatgtanagagatatgcagaaacgctagacngtgaaatggacgctcgtctgatcttggacgaaacagatggcagactgtcaaagaatagcttaagaaatttgcgcataatgactgcgcttcttcagagagccatggagaagaaccttactctgtatgaaatccgttcccttgtatatgtccgccatcccgacac

SEQ ID NO: 3504 - DNA, 367 bp, Cyanidium caldarium
  unsure at all n locations
  Clone ID: LIB190-070-Q1-E1-C4
aagggaaaggaaaggagagaaagaagaaagggaataaatgcaaagatctccaaagaaaaggaagaaagaaaagaaagggagacacaattaatgaaggcaaaaagcataaggagttgaaacggttaagaaacccgttagtccaagcagttaaagaaagaatgagtaagaaaaaaaggagtcattccaccaaggggagtanaggcgcaagaaagaaaaccaaaacaattgaacggaatcggaaaaaggggtggatcacgtaaattaatccgataaaccgagaaccttacctctccaagaaggtgttgcacggctgtcgaaagaacgtgctgtgaagtgagagaacgtacgagaaagcaagtgaggaaaa

SEQ ID NO: 3505 - DNA, 378 bp, Cyanidium caldarium
  Clone ID: LIB190-070-Q1-E1-C5
agcagcactaggaatacgagagataataataataatagcgatcatagcaatgaatgccaacaagtagttttaagtatattacacaatgtactgcagcaattatcgtccagtctacctacgagactacctttgtatgattggtggatggaatgggaatatttttgcaaggaaagaatgcaacaaatacaacttggcagagtaagagagaccgatcgtcatatacgtgaacaacgagttgtgcaagtattgagaagaattcaaggagaagaggatgaagtaactatcgatgaaatagaaatagcagccaagacagttgctcgtactatggattattccgattcttaatggtccgatcatggaaataagaagaatagatca

SEQ ID NO: 3506 - DNA, 283 bp, Cyanidium caldarium
  Clone ID: LIB190-070-Q1-E1-C8
cggggttgttttcttggtagcagttgtacattcaggatcatcaaatgccatacggatgaaagagagattcttcatggaaagaagccacatgtaaacctgcagcagcacatgctacatcgacgacagaaaagtctggtccggaagccaagttgaagggaactggtgcatagaaacagtaacaagttgactatgcatgtgcagtcctgttatgttttgtgagttctgtttgatagtttccagctattcttttggtagtgaataaagagaaaattttttataaaat

SEQ ID NO: 3507 - DNA, 306 bp, Cyanidium caldarium
  Clone ID: LIB190-070-Q1-E1-D1
atatctatgtacataaataacttgtgtatacattagcttgaaacctggcaaagtagtagttgttttgcaaggtaaatatgccggtagaaaggcggtgatcgtccaaaactacgacagtggaacgcaagaacgaccctatggccactgtgtgattgcaggcatcgacaaatatcctcgtaaagtgacccgaaaaatgagtgagaaaaaggtgaagaggcgttccaaagtccgagcgtttttgcgcgtcgtcaactacaagcatattatgcccacgcgatatacgttggacttggccgatgcactgaa

SEQ ID NO: 3508 - DNA, 367 bp, Cyanidium caldarium
  Clone ID: LIB190-070-Q1-E1-D12
aaccaagcgtctgcgaataatgagatattttgtttgtatttattggcctgcatcgaaaaagaaaatggcaaatggaatattgcgttgtcgttggcagaaatggcaagagatgaatgcattcgtatgcatttggagtcgagtgctttttggatccaacttcatctcctcatgacgaatatttatatgaagctgagtcgtttcgacgaggcatatagctctcttatgaatgttgcggaatgtatagaatcgagcaatgttggttatgatttgtccttgggtatcgagttggatgccttgttgggaacgatcatgcaatggagatggaatgaaacattggcacaacaatgcttggatagtttaagaagaa

SEQ ID NO: 3509 - DNA, 293 bp, Cyanidium caldarium
  Clone ID: LIB190-070-Q1-E1-D3
ccctgcctccggaattaaaaagggcaatcccctttggttggaacaaaaaaccctaatccgggtacctgaagccttaaacgtaatggtgaaccttgaacccaaaccggtggaaggtgattggaacggtcctggttgtcaaacaaacttttcaacaaagccgatgaaaaaggatggcggttacaagaagtaaattttgccagtgatggaaaagttaaaggcaaaacataaggaacacatcattgcatatggaaagggaaatgaaaagagacttacggggaaacatgaaacggcat

SEQ ID NO: 3510 - DNA, 316 bp, Cyanidium caldarium
  Clone ID: LIB190-070-Q1-E1-D4
attggaattccaaaaattggaaaaaattcaaccccaaaaaaattgggtataaaaaattttggaaatgaattattacctgaaggaactattatatttagacataaaggaaaaaggtgtatgatccaggcaaagaattgacgcattaaataagaaagtaacacatgcaaataggtaaagcaaacgggtgagtacagaggtgtgaaagagtggaagaacatgaaagcacagaagaatgtaagaaatggttagagtacaaaccataaaggaagtaaaagcgggaatctgagaggaggaaagccacattggaactgagaaa

SEQ ID NO: 3511 - DNA, 386 bp, Cyanidium caldarium
  Clone ID: LIB190-070-Q1-E1-E1
cacgcgtccgaaatagacgctcaagcaataactattcgcatcaatacgatttatcacgatatgttccagtagtttgtgaaataatggaagaacttttagttcgaggcctatccaaggccagttatccttttgtggttactgagtttggtcctgacacttcgagtagcgatgatgaagaccaagaacgaggcagatccagtaaaagtgtacgtcggaggtctcgaagtggtagcatccgaagaagaagaagtgcaagtagagattcatcagccgagagaggaaatagcaggtccaataacggaagtgacaatgagagtgagcgtccttcgcgactttcgcgagaaaatagcaaaaagcgtccgttaattgtatttgttgctggtggt

SEQ ID NO: 3512 - DNA, 411 bp, Cyanidium caldarium
  Clone ID: LIB190-070-Q1-E1-E10
agattagaggacaaaccctttgctgcttttgtcggagttggtacaaggatgggaaagcgaacgagaaaggtcggtatcgttggaaagtatggaacacggtatggcgcttctataagaaaacagataaagaagatagaaattgcccagcacgccaaatatctgtgtgctttttgcggaaaggattccataaagagaaaggcggttggtatttggtactgtaaatcttgcaacagatcaatagcgggaggtgcgtggtctctgagcacccaagcagcagcaaccgtaagaagtaccattcgtcgtttgagagaaatgacagaatcgtaacggagcaaatattaccaacttggctgtttgttcgcaacttgcaagtgaaacttgctgtttcctttatcaataagaataaagaga

SEQ ID NO: 3513 - DNA, 98 bp, Cyanidium caldarium
  Clone ID: LIB190-070-Q1-E1-E12
gagataaggaaaatttcaccttgaataatttggttggaaccaacaacaacaacaacaacaacagttacctcaccaaaaatttttcacaaaaaggtgta

SEQ ID NO: 3514 - DNA, 430 bp, Cyanidium caldarium
  unsure at all n locations
  Clone ID: LIB190-070-Q1-E1-E2
gacccagcgtccaccacgcgtccgaagggaaattgatttggtaaggtcgtcttcaaatgagtctatcgagacgttattgctaaagacgtttcctaaagaaatccctacttcgtattgtctcgtgtatgcacttttggctattccagtactcgcgctcgacgtgtatttatatcttgccgtactccacttgaactttattgcttcaagcgtttcgttgatcatcggtactacagtcggcttggtgcttctagttacgtcgtatcataaaactgcatatgccaagtggtctaagctcgatcgcacaacagagcaaccaaccaagagctctttcaagggtaatttgtcnggcatacgaagtggagttgagagtcacctatggctcctggaaagattctcggtcagttacagtgtaatgataaacaacgcaata

SEQ ID NO: 3515 - DNA, 355 bp, Cyanidium caldarium
  unsure at all n locations
  Clone ID: LIB190-070-Q1-E1-E3
cacgcgtccacccaagcgtccgggacattgtcgtacttggtaaatgaaaaccaaaagcaaaactggtcaaacttgtgagtattgataatgaattttttgaagtagacacaagcattgtatccctttctgaaacaataaaaaacgtcttggaagacacggaggatacagagagcattcccttgcctaatgtggaaggacgaattcttgcaaaggttatcgagtattgtagatatcactcactcttaaagaccattccgcagtctgaggaggatattgagcgctgggatanggaattcctanatgtagatcaacaaccctttttcatttgattctggctgcaaactatttggatatc

SEQ ID NO: 3516 - DNA, 352 bp, Cyanidium caldarium
  Clone ID: LIB190-070-Q1-E1-E7
agttttggtttattgaattgggtatcaacgtgtttcaaacaatgtggtggttggttggagcaattgttgtatctgcaaaaaggcctacaagctctgtactagacgctttaaacattactaaggatattaatgctattgaaggtctatcttggatcaactttgcctttagcctattcctttgtggaattgcaatagcagatggtttgttggttggttcaagaagtgcaggctcggggaaacaaaatagtggaaatagtaataatgcgtgagctgttgggtacttgtgaatagattattgtttcatgttgtgcagaaaataattcgttgtttgttaaaaagattgtattggtgc

SEQ ID NO: 3517 - DNA, 376 bp, Cyanidium caldarium
  Clone ID: LIB190-070-Q1-E1-F10
ccacgcgtccagctgacacgtgaagcttgcagtttccgagataagatgtcggaatttaacgaacttaatgcgaaagttttcggtgtgagttcggacagtgtagagtctcacaagtcgtttgccgatgaacaaaagttgacgtttcccttattatctgatgaaggcggtaaagtacgcaagctatacggtgtaccaaagagcatgtttattatgcctggtcgctgcacttatgtcattggtccggatggtattgtacgacacatctacaacagtcaagtaggtttcgcaaaccacgtggaggaggcaaagaaggcgttggaaaagatacgaaacgacgctcaaacagcagaagagtgaacacactagactgctttgt

SEQ ID NO: 3518 - DNA, 386 bp, Cyanidium caldarium
  Clone ID: LIB190-070-Q1-E1-F12
agttgcatgactgggttactataaattgcaatatcacacggtgcaaccgctttatgaattgcatgttttttgagatcacacaaacacttgtacactgaatgaacgacgtatgggtactaactgtgcattttgtatagatatcaacgatgtcaaatatgttaacaactacgatttcccgaatactatagaagaccaagttcatcgcattggacgcactggtcgtgcaggtgcccttggaaagtcccatacgtttttcactccggataaattccgtgttgcgaaacaattaatgaacatgttgcgagaagctggacaagacattcctcccgatttggctcgtttgataaaaacatcgtcctttggcggtaacaacagaaacttttctc

SEQ ID NO: 3519 - DNA, 404 bp, Cyanidium caldarium
  unsure at all n locations
  Clone ID: LIB190-070-Q1-E1-F2
acgcgtccaggaaaattgtgaaaagtttcctggggcttcccaaaattcaaaggaacatgaacccaaatctgcaggaacggtttggttaaggtcatcaaaattatcgatattctagaagtgtatcgtgatagtgcgcttggtttggttgatatctatttgagtggtgttagtcataatatgcaagaaattatgaaaacgctgactattataagtaccatatttattccactaacgtttatggctggtgtatacggaatgaatttccctcgaatgccagaattacattatggatatggatatactatcttttggttgatggcacttgtcatagttgggcttgaaatatttatttttcgcaaacgaggttggatangaagttgatgtatgctgcagatcgaattgtc

SEQ ID NO: 3520 - DNA, 298 bp, Cyanidium caldarium
  unsure at all n locations
  Clone ID: LIB190-070-Q1-E1-F3
agnaaaaggtgtgaaagtaaccaagttaaaaccaataaggtgggaaaataacaatggatttaaaacaactccaatttaaggccttttaacccaaatcctttccttcctccgcaaaacacggttgaaaagtcaattagggaactgaaaatagcaaggtcggcttcctcgggtccttttccaatcaaggaattgtcgggaacgggtaaatcactcgtcggaaagcagaagaggggggaatatttaagccaaagtctgaagccggaaatatttagaggagactcaacaagaacaactggat

SEQ ID NO: 3521 - DNA, 390 bp, Cyanidium caldarium
  Clone ID: LIB190-070-Q1-E1-F4
caagccttccagtaatgcaggcaaagaattgccccattaattcaaggattaccacatgcaattaggtaaaccaaacggttgattaaaaaggtgtgaaagattggaagaccatgaaagcacagaagaatgtaagaaatggttaaagtaaaaaccataaaggaagtaaaagcggaaatcctaatgctggtggttatcctccacctcctccaccttatgcaaacggtgcatattatcctccacctcctcctaatcaaggaaatatgccatttggtggagtacgacgtatgtatggggctcctcctcctccacctcctcctccttatggttgggatctgagaatgggtcaaaaaaagatatcctccttattaacatggaatactagtgtgtttt

SEQ ID NO: 3522 - DNA, 360 bp, Cyanidium caldarium
  Clone ID: LIB190-070-Q1-E1-F5
acggacgcgtccgacaacatccaacgacccatgcccaattgttgtttactggagctccacaaggtcagtgttttgtggtgtgggtacctcgttcctttgccatagcagtagcttcggcgtatcgtattcctatttatgtgagtcgcttgctggtagaacgcaatagcgtctatcctcgagtggactgtagaggaaagtggtatatcgcaaaccaacctgcaatttgtaatctacctcatctatctcgaaatgcacctatttggaagtatcgcatttcggaattggaaagaatggacacacaacagttgtatgataccatgataagatccggtatctcttgtagtagagcaaacacgcatc

SEQ ID NO: 3523 - DNA, 378 bp, Cyanidium caldarium
  Clone ID: LIB190-070-Q1-E1-F9
agacggcgtcgaataagcaattgtgggcgtagaacaatatgttgatacctaaaaagaaccgaaacgcagtttattcttttattttatcgagtggagtaattgtggtgaagaaggacactcatgccaaaaaacacttgcagcttgacgttcctaatcttgaagttatgaagatatgtcagagtcttacttcgcggggatatttaaaggaacagttcagttggggttacttttattatactctgactgacaacggaatcgattacttacgtcgatatttgaatcttcctgtggaaatagtcccggaaactctaaagaagcctactagacccccaggtgttcgcccttcgtcgtttccatcagaaagtcaagaaaagagag

SEQ ID NO: 3524 - DNA, 402 bp, Cyanidium caldarium
  unsure at all n locations
  Clone ID: LIB190-070-Q1-E1-G10
cccagcgtcaaaagcanttgtgttccagtcccttgttgaatgtcagcaaaataccgcagatacttgaaaatcgacgcaatgaatctacaggagaactttctcccatcacgttgagtttccaattggcaggaaatatagctcgtgtatttacaactctcgttcagttacaaaatagatggtatttggcaagtattttcatttctcttgctttgaatgccattcttggctttcaatgtatgcgttatcgatgtaggcctcagtcgatgtcctctttcaaggatcgcatctgagtgacacacactcacacaacttgacatgattattcgcaatgtcatcgattctccaggagaatgataaatgtatgtgtgtttgtgtgaacaatgcaatctatcatctatcgcc

SEQ ID NO: 3525 - DNA, 385 bp, Cyanidium caldarium
  unsure at all n locations
  Clone ID: LIB190-070-Q1-E1-G11
agtctttcanacagacgttggggtaactccaaggccaattcaattttaacaaaatccaagaacttttttggcaatccaaggacaaaattcaagttcccgggcaaggaaagctttttccaacccggaactaacctcaaggaacaagaagggcaacgccggtccaacggcggtagcaagtttccttgaacacanggacaaatccgtttaanataaaccttttgggaagagaatgaataatttcgttggaagcaaggaaactttttgtttctacgctgttatcatgtgcactcttgaacctccttatgttctttttctagaattggagacaagcgggtttattttccgttgacagctttactggaacaactggaatttgatttttcga

SEQ ID NO: 3526 - DNA, 197 bp, Cyanidium caldarium
  unsure at all n locations
  Clone ID: LIB190-070-Q1-E1-G12
agcaganctgaagcgacattccaaatgtcctcaaggggtgtcaaccaagccaaaggatgaattgcaagttaagttaacctttgggtttgccttaaaaggattaaggttaaatcccaagttactttggcaatataattcaatggaagccaaaaataaacctgtgtcacgttaatgaattagcgccaataatggtaatg

SEQ ID NO: 3527 - DNA, 248 bp, Cyanidium caldarium
  unsure at all n locations
  Clone ID: LIB190-070-Q1-E1-G2
acgcgtccaagtaataacagtataattcagttataaatcaagggaatggtaaaggcaatttaatccataattgcggaaggaatattacacccaaggatggaaaaccaggatataaggaatttggaaggaggtaggatgaatgtgagtaaaatgggagtaataatagggagtatgggaataatgggaatagaatacagtagcgtataagaacatgaggaagaaagaggcanatacgggaaagcagtana

SEQ ID NO: 3528 - DNA, 326 bp, Cyanidium caldarium
  Clone ID: LIB190-070-Q1-E1-G3
aaccacgcgtccggaaaaaaggcaaatacggaaaagcattaaaagaagaaagagaaaggaaaaaactgattaccaggaaaaaaaaagggattaaatgaggaaagaaagatcaaggaagtaagagtaagagaaggagtaatgtgaatgaaagcaggaaagtatttgaagaagaaattgtaaagcgcgtaccttttgcataatgtcccaccgattgaaagaggaaccaaaaagaaagaaaaagaagtacccaggtaagacccgaagctagttgatcttatgctgtccaaccgaattaaggctgaaccagtacctgtggaaaaagattt

SEQ ID NO: 3529 - DNA, 412 bp, Cyanidium caldarium
  unsure at all n locations
  Clone ID: LIB190-070-Q1-E1-G4
ggtgtggactccttgcacgtacaagataaagggaccttggagaacgcactaagtcccaaaaaagattaacttccttaaagaaaagttgagtttccaaataatgccgatgaccaagttaaaattggccaaggggaaaaacctaacaactttccatctcggaaaaaccggccgggaacctttgctccagatttggtncaaaaatacgggaccagtcatgtgttgttacaaggtttgcaagcttcagtttaaaaaagtggggactacaaacaaaggtggaacaatggggtcagtactatgggcttaagaatacttttatcaagttacatcgcaaactgttttgttggatagacgaatggtatggacttacagtggaagatatcagaagggatgaagatgaaacacaaaagttgac

SEQ ID NO: 3530 - DNA, 367 bp, Cyanidium caldarium
  Clone ID: LIB190-070-Q1-E1-G9
acccacgcgtccggagtacatgtaggaatgtcatggttagggataagtagtgtaataataatgggaataatgggaatgataaatgtggtaagtaggtcatataaaagcatggagtatatggagaggataagagaagagagtagggtgtatgtacgaatgagtataataacaggaatgatatggagtaaagaagtgtggggatcatggtggataaatgatgtaaggaatataagcatgttagtatgctggatatggttggaagtaataggaggagtaaagaaggagtacagaggaataataagcagtataggaataataaatataccgataataaagtactcagtagagtggtggaataccttgcatc

SEQ ID NO: 3531 - DNA, 105 bp, Cyanidium caldarium
  unsure at all n locations
  Clone ID: LIB190-070-Q1-E1-H10
gtccgatgactcttcccatcatcatcattgaaaagtattgtattgcagcaaactacttaaatttttgttanaaaaaaaactgcaaggtgattgcttaattttctc

SEQ ID NO: 3532 - DNA, 325 bp, Cyanidium caldarium
  Clone ID: LIB190-070-Q1-E1-H12
gtcctagtacaatccaaggcctttgcctttccttggccaaccaatcctttcaatccgtttagtactttggaaaaagggttacaaaattgtaactgttgcaaataatttgaacgaaaaaaaggactgcgactggtgagttccttccaaagtgcgcggaagtggacttcgttgcaaggtttgttatgtcgctatagaagtgacagcgttgtggagggagggaaaaagcaaaagggagtcgctactgaaagaagtcctgtttctacagccattcccatgggttatgccgatgaatatttccatcacgtgcaacgttggcgtccaggag

SEQ ID NO: 3533 - DNA, 374 bp, Cyanidium caldarium
  Clone ID: LIB190-070-Q1-E1-H2
acgcgtccatcaattgttacccaccaatctctcctcctcaccccaactagtagaagaatatgttggcgtttacttgtctcacagactgtcgttggttaggtaaaacaaacaatattctagtcttcatgctaacctgtttcgaatttagagacttctcgattctccagatgtgccaaagccaataccgtctcgttgcgacgtagttcccagtgttcacactcttggaggagtgtttcgatgaactacagtccctattcgataactaccgacaaatcagaaggacatattgttcccggtactttttcaagatttgagtttcttgaaggtcgagtcaccggtccaacgtgagtatttccttttactgctcgatacag

SEQ ID NO: 3534 - DNA, 303 bp, Cyanidium caldarium
  Clone ID: LIB190-070-Q1-E1-H4
acccacccaggcaacgttacccccccattggaaatcgcaatcctatggaaaatactttggtaccaatacatttaaggtggactgagggaggacagaatgttcctgtacctggaagtttcaataactggacgcctacaaggatgcagaggaaggacaacggtacttttgaagtaactgtggaagctcctgcaggcaaagtcgaattcaagtttaatgttgaaggtgaatggaacgaacatataacttatgaaagcaagttgagcagcatgaactctttgaacaacgttcaactcgtggaaatac

SEQ ID NO: 3535 - DNA, 400 bp, Cyanidium caldarium
  Clone ID: LIB190-070-Q1-E1-H6
ggccgcctaagtgactgcgcttcttttcaatcctttcaaatattgagcttggaccatcgaaatcctcggtatatttttgaataaaaaacgagaactaatatggaaaaatatcgaagagttgagcgagccaaaagtccgggccagactccgccgaatcaagtacgaataactgcggcgggcaaagtgccagcctatgtggactatgcagtcaagttgcttcaagaggataatggcaccgtggaaatcgtcgggctgggtaatgccatcaataaggctatcactgtagcagaaatattgaagcgaaaagtccccaagttggagcaagtaacaaatcttagttcggtgactattgaagaccgctgggaaccattggaagaaggcttggaccctattgaaacga

SEQ ID NO: 3536 - DNA, 351 bp, Cyanidium caldarium
  unsure at all n locations
  Clone ID: LIB190-070-Q1-E1-H8
cccacgagtccagcaagcgtgaaccgtgagggtagttcatcatggttgagacaaaacttcaagatggtgttagtgcttctctttggactgttcgtctcttcctctacacagttattttagcattctctgccactatcattggcttggatggacgtaaagcagacaacatatggaacgacagcttattctatgatgggaagtacattaacttttgtgcttattctgcctcttctgttgtagaaggaggggaacatggagcgtgtaaatatgtcatggcgttggcgtctataatttggnttcaagtctttttcttgtggctttttacatttgtagatgcgttgtatcctattc

SEQ ID NO: 3537 - DNA, 273 bp, Cyanidium caldarium
  Clone ID: LIB190-071-Q1-E1-A1
cccacgcgtccgagtcgtgggtgcttggtctggttgctcaacgtgtgaaatggcagtagttgaagataacagagtcgttgttggtggtcttccttggtcagttagtgaagaagaccttcgtgaaactttttccaaatatggagaagttgttgatgcaagggttgttgttgaacgtgaaactgggcgttcccgtggttttggtttcgtatcctatgcagaaggttccgccgtagacgaaggcattgccgcactggatggcaaggatatgcaagg

SEQ ID NO: 3538 - DNA, 415 bp, Cyanidium caldarium
  Clone ID: LIB190-071-Q1-E1-A12
gaaaatcctcaccaagaaaccacttgtacagcgatagaagaaaggatacatagaaacaaattgtttcaaaatgccatgaatgccttgtcatctctcatcgaaaagaatggcaaggcctttcaactactctacagacattatttaaggagagatgcctacttgagtggagcagaacacaaagtttctggtcagtcccaactgtctatcaacgatatgagaagattcgctcaggactttgatatatttccccactatgttcaactggaaactttgagagaaaccctgttggatacggtcaacggctacgacgaacgaaaagaccacagaatatccgtggaattgaatagtttagaagaatggatacgttggttggtgatgattgcttattatgcatttggagatgaaacctttgctc

SEQ ID NO: 3539 - DNA, 269 bp, Cyanidium caldarium
  Clone ID: LIB190-071-Q1-E1-A3
tcaggcgacgagtccgcagagggttccttgtagattcgatgcgtccatgcagtgtttcagagaaatggaatttttcaatccaaatggttttcgtcgtatgaaggatacttgtttggatgatggctgccgtgcaactaggcagaagaagaagtgtgagggtaactatccaaatgagaaatcctacgcagcttccaagaagcacatatgtaaagaattatttaaaggtgatgacaacgcgtcggcattccagaaagaaagggataccacag

SEQ ID NO: 3540 - DNA, 275 bp, Cyanidium caldarium
  Clone ID: LIB190-071-Q1-E1-A5
gacgttgttagcgacgactgtgtgagagactacttgtacgtgcttcattcgagtagttgaaatatgacgagcaagtgtcacaaaacataaaacatagagttgcatgtgttacggatgtgacacggaggaggcagccaacgtgaggttgatagacgaccagcacaaaagagggcagagaagcacaagaaaaatgttcaggtggacggggagaatattgttttgaaaatggaaagggacgtggaaataatgcacgaaaggggagcagcagccatggc

SEQ ID NO: 3541 - DNA, 287 bp, Cyanidium caldarium
  Clone ID: LIB190-071-Q1-E1-A6
cccacgcgtccggcagtcactaaggaagctttgtaccacaagttttcagaaaacaaatgagaattcgagtaaaacgagtagcgttggtatcttaggaagtgttctaattggtgtatttagctgacttggaatgtgtttatgttactagtctttggttctcgccatactatgtttacagcgtaacgttgcaaagataggttgaacgtgcaccgccaatgtttttttttgtttataaagttgttgaacataagaaaaaaagtgaaaaaagaaaagaaaaaaggggacgg

SEQ ID NO: 3542 - DNA, 303 bp, Cyanidium caldarium
  unsure at all n locations
  Clone ID: LIB190-071-Q1-E1-A8
aaccacgcgtccgggatagtcgagagggaaaaagcccagaagccaggataaggtatcaaagtaaagaaagaaggaaaaggagaagaagagagggtaggcttagaagcagcagaccagagaggaaagcgttaaagcatgaaagaggggaaatccgaatgagaagagaaaaaggtaagaaggaggaccgaatcagggtaagaggtagaggagcaagaagagaagagagaatgctgggtggagtagcgaaacaagagaagggaagtaaagggtaagaaagaggaaagggttacgagagaangaagt

SEQ ID NO: 3543 - DNA, 373 bp, Cyanidium caldarium
  Clone ID: LIB190-071-Q1-E1-B1
ggtcgagggacgcgtcagagtcaaacaaccggcgtcgaagtccggtgacattcgaaataggacgtcggtcaaggcaaacagtagtcatacgaatgataagtcttccggaaaagggcgagatggaagagaattcagaaaagacaatcgcttacgtaaggagtggggtgccaagcatgccaatagtcaacacacggtgggcaaggacgtgaagcaaacactatcacaagaacaagtgagcaactccgaagcgagaagagagttacgctcgagctcagtacatgaaagtgatacaaccaatgttacgaggatcttcgaaactatcaaagtggggctgcaggaaaaccagtgagagtgagaaaactgtcgtctgaaa

SEQ ID NO: 3544 - DNA, 418 bp, Cyanidium caldarium
  Clone ID: LIB190-071-Q1-E1-B10
ctgaaatttctttgaccgatgttagtcattattttgatgccgatccaaccaagttagtacaaagtttgagagcagacaagaagaagccggtatcttatgttgcagacacgacaacagcgaatgctcaagttagaagcctggacgaaatggttcgtttggacacaagaacaaaacttcttaaccccaagtggtatgaaggaatgctttcgtcaggttatgaaggagcgagagagctgagcaagaggttgagaaatactatgggttggtctgcttccgctggagcagtagacaattgggtttatgaagaggcaaatgagacttttatcaaagacgagaacatgaggagtcgattaatgaacatgaatcccaattcatttcgtcaaatgattagtactttgttggaagccaacggtagaca

SEQ ID NO: 3545 - DNA, 320 bp, Cyanidium caldarium
  unsure at all n locations
  Clone ID: LIB190-071-Q1-E1-B3
ggtcgacgacgcgtccgcccacgcgtccgagcaggcatgcagtgggaacagggtggagaggaacagaggggaacgagttcgagagcagaggagcagaagcaacgttgcgaaagacgagagaatcgagcgctgcagagagataagagagtagtgtttacgttgggagaacgaagggaagccggctgttatctccctgaggagcgcattctttgtcaacattgtgaggctgctgtangaggtgggtttcaagaggagggtagcgtcgtcctttgttcgaatcactgactatctcaaggagtacgcggatgtcacgcttgttc

SEQ ID NO: 3546 - DNA, 404 bp, Cyanidium caldarium
  Clone ID: LIB190-071-Q1-E1-B5
gccactgcacgtgttgtttgttggggcaacgaaaaggataagagaggaaggggcaatgcatatatgaaggaatggagggaaaatcttgtgtaggagacaccctaggaaaaccgccaaatataaaagatatacagcaagacaaggagaaccttttagaatcctggacggaaacgagtctttcatcaagaattgctcaaaagtggggaaagttaccgagtaccagtttgttttagctacactctccttctactagtattgctcataaagagtctctctcggatgagaacgataaaaatcgcatcgatttggaacaactattgcattcgacaaagtccctttctatttcggacagccgctatcctttcaaagacgaaaaaagcaccaaccatcgacaacatttatta

SEQ ID NO: 3547 - DNA, 113 bp, Cyanidium caldarium
  Clone ID: LIB190-071-Q1-E1-B6
aatttctggcggaagaagacatttcatttcattgtgtggagtttgaggtgtccatttctctcgtgttgtgtcgcgcactgttggtttcctatttgtctcttatatatactgca

SEQ ID NO: 3548 - DNA, 294 bp, Cyanidium caldarium
  Clone ID: LIB190-071-Q1-E1-B8
cccacgcgtcggctgacgcgtccgcccacgcgtccgcgtccaggaggcaagtctcttatcatgtggtagttttccaaatatcctttgtggaaacgtgtttcgtctactcacggaagagtattgcaccagttactacgggcggtgtgtgatccacagtaaagtataatagtcctttgcagttgagtaaagcagagatatggagagcttcttatccaactgggagcagaggtgcctttgcagaacaaaaggcacagcagcagtcgaaagaaggtgaagaaccggaacgccttatca

SEQ ID NO: 3549 - DNA, 417 bp, Cyanidium caldarium
  Clone ID: LIB190-071-Q1-E1-C10
cgatgttctcttccatccaactttgactgtaattattgttacactttaggacataccgctggagccttgattgaaggtggtcgcactggtcttgttgcaacggtacgtcacttaacaaaacctcccgagcaatgggaagttggaggttatcctttgaccgtcatgatggacatcgagaggagaaagggaaagaacgttcccgtcatcaaaaaggcgttggtggatttgaaaggcgaggcatttcgcatattttctgagcagcgggactcgtggcgtttgacagaagattatcgttgtcctgggcctattcagcatttcggtccgatggcagattcgatcaacttcactttgatgtcggaagcacgagatagcaatgagtagtttgtgggtgagaataatactctcgttgaaataaat

SEQ ID NO: 3550 - DNA, 419 bp, Cyanidium caldarium
  unsure at all n locations
  Clone ID: LIB190-071-Q1-E1-C12
cccacgcgtgggcccacgcgtccgcctcagcagtttctccaggttttatagtacttgtttaatgtccaatgttgtgagcaagtctcccttacacccaacagcggttcttcgttctggagcagcaccaagcctgcgcttattctctggtcaaagtggaagaggtcttgggagtttttcgttcttcaaagaacctattgttccattcaataccttttctaccagtggctttagcaaggtggaccaggaatctgacgccgacttccagccaaagtttaagaggcctgtctctgccaatataaatgacgtcattaagcagcaagtagaaagttccgatgttgtgctatatatgaaaggttctccttctgcaccaatgtgtggttttagctttaaggtggtacanatattgaatgccttggggg

SEQ ID NO: 3551 - DNA, 314 bp, Cyanidium caldarium
  Clone ID: LIB190-071-Q1-E1-C5
gtgatgaatggaaactggcaattttcgagacttcgtgtacgaacggaagacttgctccagaaagtcaatcaacttttgaacgattgtaagctcgcagaaagcttttctgaagattggaaagaaagtcttgggtaagttggagaagtgtcatggacgaaacgagaaacagtgaacgggtcaaagggagcaaatatatgaaaagtacacttccattgtcacgttagagcagttgctaagaaaagatttagaagtgattttatgttcattctcaaagtcgctggtaaagcctaaagttgttgcgagggagaggcttc

SEQ ID NO: 3552 - DNA, 325 bp, Cyanidium caldarium
  Clone ID: LIB190-071-Q1-E1-C7
agaaacggagagaagggtatcggactcgtataggaggttatcggaagcggtacacagtttacaaaagttgcaaacgcagatggaaaatttgcgaggaaccaaagaatgggaacaagccgatgcgttgttacaacaagcacagcaggttttatcacagacctcgaaagtttaaccagacaaagcaatgtattgaaactgcgtcgacttgttcaagatgccagcatcgtaatcgaatccttgggttacaaacaatcgttgcaggacttgcatcctgtcttgagtcagataaagaggttttccgcgaggggggaaaaaatgggtcggg

SEQ ID NO: 3553 - DNA, 384 bp, Cyanidium caldarium
  Clone ID: LIB190-071-Q1-E1-C8
cccacgcgtccgcccacgcgtccgcccacgcgtccgacaaacctcaagtgggtcatcccacgttggtaaagatagacttgtctcaaggcagcttgaaagtactccaagactgtgacagagatttagaatgtgatcagaatagcaagtttcagttggaacttattcagtatggtctcgtttcacctggtttttggacgagagaaaatgttctgctcttctagttggagctcgtgtcaggtgtattcataagggacactctctaccttttctacaagaaaggtgaagaacatttgtttgcgagttgaatgctgttgttggagacacaagtttcactgtatgcagacataaaagcacgctgggagaagcgacactttatcgtttgcc

SEQ ID NO: 3554 - DNA, 409 bp, Cyanidium caldarium
  unsure at all n locations
  Clone ID: LIB190-071-Q1-E1-C9
cccacgcgtccgcccacgcgtccgcggacgcgtgggtagaaagaagagagtgtaaggcggcgtcataatagaaatccgaaaggagtagaagaaaagagagagaagaaagaaaagaagagaaaagccgtactgaagaccgacacaggtactcgaggagaaaggagacccaaattaaggtgagagaatggacgataaggaactaggcaaaaggatatggtatctgcggtaggcttagaagcagcaaaccagagaggaaagcgttaaagcatgaaagaaaagaaatccgaaaaagaagagaaaaaggtaagaaagaggaccgaatcagggtaagaggtanaggagcaagaagagaagagagaatgctgggtggagtagcgaaacaagagaacggaagtaaaaggtaagaaag

SEQ ID NO: 3555 - DNA, 413 bp, Cyanidium caldarium
  unsure at all n locations
  Clone ID: LIB190-071-Q1-E1-D10
cccacgcgtccgcacgtggaccctgtggaaaaaaactcaagtagaagatactccagcaaagttcttcctaggcctagtacctattcgaccaggagtgaaaatcttagaccttgcctgtggtagtggggaaacctcccttcaagttgctcacctagtttccagccacttaaaggatgaagccaaagacgcaaagatagtttgcgttgatatttcggacgaaatgcttaaagttctcaaccaaagagcacaggaaatggggctagcaaatatggtggaaacccgctgtgaggacgccgagaaggtcgactttggtgcgcactattttgatatggttatgagtcagtttggagttatgtttttgcnccatcttgtggaagacttggcgaggattcgcggtatgatgaaaccgggta

SEQ ID NO: 3556 - DNA, 99 bp, Cyanidium caldarium
  Clone ID: LIB190-071-Q1-E1-D5
taatgggactacatgtcggcatgtcatggttagggataagtactgtaataataatgggaatcctcggaatcccacatgtggtaagtacgtcatataaaa

SEQ ID NO: 3557 - DNA, 379 bp, Cyanidium caldarium
  Clone ID: LIB190-071-Q1-E1-D6
gtcgagaaggaccacagaatgtttggtggtggtcgtttgactgctgctttggtttatcgtctgacccgaaatttttgttccaaagtattagaagatactcctagttgttttacagcaagaaagacagtaccatctgtcgagtgcttctgcagctcaaggaagtcctaatgtcttggctcaagttgcatatccagttgtggagaatactcgtatgaaagctttggtgaaagcggaagctgcaccaggtttggtattgcgtgatgatattggaatagcttctagtggaagtaccgacgtattggataggagaggtaaaacgagtagaggtggaacacacgtgcatatatatgtttgggatgagtggagcaaaagcactgtt

SEQ ID NO: 3558 - DNA, 378 bp, Cyanidium caldarium
  Clone ID: LIB190-071-Q1-E1-D7
cagcgcttgggagcgaaactggttgctaatttggcaaaggaaatcgaaaagcgtagtaaacaaggcaaatcctcgtttgaagtttggaacgaatgtttagacttggctgccgaagttggaagagcacatacggagttgcgaagagcagaactttcggaacagttgatacaacgagcgagtgctaccgattcttctgtcggaaacattttgaaacagtgtcaaacgctgtttcttttacatttgattgacaaacagtcgactttcttgcgttagaattgcgtatctcctccagacgcagaggggttgcatcgagtacgagtcgagctttgtatgcaacttcgagagcaggcacggcctttggtggattcttttggaata

SEQ ID NO: 3559 - DNA, 377 bp, Cyanidium caldarium
  Clone ID: LIB190-071-Q1-E1-D8
agagaaacagttcctgtagtgatgggtagcgatgattggatacggaagcctatgtttcttcttcgcttactgactgagaatactcttaagagattggaagtttaccatattgtgacatttgatggttccttgtagaagtgcaacgttagttgttcggtaatattaggagataagtgggaaccagatagttacatatttttacttcagaatgcggagagactcggacacgagcctgtggcaggttcattcctgcatcgagtagtttgtcggatgaagtctgagagagaacagaataatgtgagcacgctaacaagttcttgtcagcataatcagccagtgttgaatttagcccgagtgtcgaaggaattgtttgcggc

SEQ ID NO: 3560 - DNA, 412 bp, Cyanidium caldarium
  Clone ID: LIB190-071-Q1-E1-E11
cccacgcgtccgaacaaaagttgttttcagtagaaggttcatgggaccaccaaatcagaatcaaagatgttgcaaagaaaacagaccgcgttttgtttgattacgacgatattgcgaagcgttatcgaatgaaacttttattgcctccacctgaagcattagaagaaaccaattcgttatatgtatgggaaggctgcactcgagctattttagaaggaaattctaggcttgcagccgaagagaaacataaagtagaagaagaacaacgtagactacgtcgagaaaggatgcaacaaggaattcagtgggaaccaaaatattttcgacgctcatctgatggagaaggctatgaatttcgtgaagaaactgcagaaaaattgtttcatggtgcaagtaacatgtcttcatcact

SEQ ID NO: 3561 - DNA, 196 bp, Cyanidium caldarium
  unsure at all n locations
  Clone ID: LIB190-071-Q1-E1-E2
tcgaaagctcccgttccgcgtgtgaacataaaaaagttgaccctcgtaaagtccaatttagcaccagcggtttgtagatagagaaagcggtgctggtgacgacgccagcgtcgctagtttgggttgtcggaatattggaaagagcgctttgtggaacgtcntatttggcacctcatttgatgttgggactgatcgc

SEQ ID NO: 3562 - DNA, 332 bp, Cyanidium caldarium
  Clone ID: LIB190-071-Q1-E1-E5
gggaaatggcgcgagtcgtttcctccgtcttgcagcgttgggacctcagagaagatgctcaagtattctccctcaactattggtataaaaacaggtttccttattcttccatggatagaaaaactttatcaacaggagccgggcagtcttctaccgagaagaaacctcccaaatgagaccacttggtttctgtcttcatagatggagaagaacgttgggtaccgaagggtggcactattcttcaagcttgtgagttttcacgagtagaaataggtcgttggtgttatcacgagcgtcttggcgggtgggggtaattgtaggaggtgtcttgt

SEQ ID NO: 3563 - DNA, 334 bp, Cyanidium caldarium
  Clone ID: LIB190-071-Q1-E1-E6
aacccacgcgtcggacagaacattcatcaactacgtcgtcatgaactaaactagcagtatgaataatttcagtaatttctgcaagtcttctgtgaaaaaatttaattgatttttctttcttggttgctttagcaacgaagaagaggatagctggacgtaatcttttccctccagcagtaaataagtgttcagctgctacatctagtattgcatgttttgacgtaacaagcgttgttaaattaatttctaataaatttaattcgtgttctataagttgaaatgtgtctatcatgaattagaggtggagtgggtgagttaagaagagagatataat

SEQ ID NO: 3564 - DNA, 262 bp, Cyanidium caldarium
  Clone ID: LIB190-071-Q1-E1-E7
accacgcgtccgctcgaggttggtttcgcgaggatgatttccgtgcaccctaaatattacttttatatacaacctataacatggagcacaagtccgagatgtgtggtaaagaaacagaagtcaaccagcgttcgacagagatgggataggggtgataagcatagctctcgtccaatgggcaagcgttttcacatatggttaaagtccctgacaagtggaggggtatttcagcggtcaagtgggggtagtggggtctgttggg

SEQ ID NO: 3565 - DNA, 250 bp, Cyanidium caldarium
  Clone ID: LIB190-071-Q1-E1-E9
cttggccacagaaaatgaccgggaaagtgcagagtacttacttgtgtgagagacaatggaaaactaggagggtttttagttgtcctttggtttcaatacatacttgaggttttataggaagaaaaaacatttgttggaagctacttgttgtttttatttaggcttggtgaaaagtacaacaattttttttggagttgctcgttcgacaattctacggtatctggtttcttcttccccttctcctcgtctg

SEQ ID NO: 3566 - DNA, 443 bp, Cyanidium caldarium
  Clone ID: LIB190-071-Q1-E1-F10
tcccggctcgaccaacgcgtacgcccacgcgtccgcccacgcgtccggaaaaagcctcctgaacaaagtaacagtacagcagttgacagttcagtttctgtgtaccagaggagagatacaaatactcctcagactctttctaatatgattggaagggattttgaaacgcaaggaaaaagaatattgcgtgagtttggtttgcagtcgattattcagcagacgccatcgtttaggaattctattgtgtgtcactcagttggtagagatggactgattgttccttattatctcatagagaagatgaaaatgaagcgtcaactggaaaatctaatagcacaacgacgtagcgggacctggacagtggaaggaaagaaaggaaaagttgatgtaaagaaatatcactggacggctaacgagaagaataactttttcagacttgtgaa

SEQ ID NO: 3567 - DNA, 432 bp, Cyanidium caldarium
  Clone ID: LIB190-071-Q1-E1-F12
gaccaacgcgtaagaggatgacgactgtgagcactcgtgtcatcaagtacaactggaaagccctgtcttgtattggaaagcagcaacaacaaccaacacaagccttttctagtgtgcaatatttcaggaagagtggttaaagtttctagtatgtcctgtttccaaacaaactttgtactatgactcggaacgcgatgaattattcaaccaatcgataagatatccaattcgtgatggtatacctttgttgactccttgggatggaagtgtcgttgaccagggagaacaagtagcttcgacaaaagaacaacaacaacaacaacgagaatagtagataaagaaccatcttgtgtgctctgtgaaagatatagagctcgctatttgtccctcagataagagagcactcatagactaggagatagccaatgcatg

SEQ ID NO: 3568 - DNA, 151 bp, Cyanidium caldarium
  Clone ID: LIB190-071-Q1-E1-F3
acattggaactgacaaaaggtccaaacctgacaagtccacactcgcgaaaattgggcaatgtacagggaagttacgcgcagtaatgaggagtggagtaaacagaaaaggaactataacggcgcaaggaacggaagttatggcaaaaacacg

SEQ ID NO: 3569 - DNA, 320 bp, Cyanidium caldarium
  unsure at all n locations
  Clone ID: LIB190-071-Q1-E1-F4
ggtcgacgacgcgtccacccacgcgtccgggaaaggatatggaaagtgctttgaaagagatagccgactagatggtgacacctgtgaaaaggtattttagcgatctgatgaacctcccggcgttgttataacccacgtttcgagctttgggagtncggaagaatgcgggagcgagaangaggtggcgtgaaatattatatgggaccaaaggattggagcaatatgttgcagctgctattctgcatggtgaaagttgtgaacaacaagattcatccactgggaaaccgttggtagatgtgttatctgacaaaggtatatta

SEQ ID NO: 3570 - DNA, 297 bp, Cyanidium caldarium
  Clone ID: LIB190-071-Q1-E1-F5
acggacgcgtgggtatcagcagccaagccgcaaagcgaagcaccaaccagaggggaaaagtcgtcttgttgtggtttttactggacgcttgtgcgcacttgacaacagaacttgcctttgtataccactccttaagcacgggcgtcggacgagccacacactggactgccttgtggtggaaggaatatgccaaagctgatacgagatggggtcgttttcaccattgtactggggcgatggaagtagttacttctctccttgtggggtcctctagctctcgggtgtgcctatggtgtg

SEQ ID NO: 3571 - DNA, 386 bp, Cyanidium caldarium
  Clone ID: LIB190-071-Q1-E1-F6
gagaaagaagaaaacgtgagcgatgcatccgtcgagcaagtacaacagagactgcacgagttgttagaaaacctggatacgttggaaagacaagtttcccaactagagtacgacagttgccgcaaggaaaccaaccaggacgtgcagcaactcttaccacaatgcaaatacttgggagagtatttgttacaactagctctacaggtggacgggttacaagtaagagcctagttgccttggtatatactcgtgtgatacatttggtcctagatttctagagaaagtgcgcaaaaggcttttcgtgggaagagacaagaacaggcaagggaaattaccaggctagtgtctcaacgaaggaaaaccaacgaacgagtgcaactattgct

SEQ ID NO: 3572 - DNA, 334 bp, Cyanidium caldarium
  unsure at all n locations
  Clone ID: LIB190-071-Q1-E1-F8
acccacgcgtccgagacacgataggagatatggggataatgttagggagaggtaagggatatgtgagttagggaagtgtatcgtatggtgtaatggagagtgtggtaatggaagaggataagataatgggaataatgataagaatgggagtaatgacgaaatcatcgcagatgggcatgcagacgtggttatcggatgcgatggaagggccgactccagtcggtgcagtgagtcatgcagcgacgttagtgacggcgggagtgtatgtggtgataaggatgggaggaataatacgaggaaggggaagagtgagangaatgggacgagggagtat

SEQ ID NO: 3573 - DNA, 296 bp, Cyanidium caldarium
  Clone ID: LIB190-071-Q1-E1-F9
cccacgcgtccggtcgtgtaccgcaaagagtcgtagagtttcaaaagcgcaaggcggaaggctactttacatacaacgccgggaagtacgaccgatacatcaacacacctatttacctgtttgtgtccttcaccggtctttatgcctttattgacggttgtctttgggcggcaggaaagaaggaaagtcaatcgtgaatagcgttttttgtccttgtggacagtcttatgaactagtgattcgtttgttctgccagttttagtttcttgtaatgaaagtttcctttttttccttgc

SEQ ID NO: 3574 - DNA, 296 bp, Cyanidium caldarium
  Clone ID: LIB190-071-Q1-E1-G1
agaaaagttgagtcaacgcaccctcatggtacaacgcatctagaagaaacaaggaatcacaagtacagctgtgtgatggagaacttgtgtagtttcttgtgctatcgatcctatacgtgcaacgattcatttcgtcaatttgaaccgcacgttgatagcaatgccttgccagacaatatttaggtactgcgttgtttttcttgcaacgtttttcctgtagtccttctctcgcttttgatttagcgcaacgctcttatactttctcggtttgggtatcgctaacggaagaaatatgt

SEQ ID NO: 3575 - DNA, 432 bp, Cyanidium caldarium
  Clone ID: LIB190-071-Q1-E1-G10
ccggctcgacaacgcgtacgtagctgtttggtgtgtgtgcctattactgcgaaatacgtccatgaagctctcgaacaaataaaagaggcaaagcggttgggagcggacctggtggaactcaggttggatctcctgcacaacttggaagatgagtggaaacaactagtgaaatactgttcagtacccaagattgttacttgtcgaccgcaatgggaaggtggaaaatatagcggaccagagtctcgtcgtttatccattcttcgtgaatcttgccaactggggtgtgtggaatatgtcgatgtggagttggaagctgtcgaaaagtttgaaaagccggcgaattgttctagcatattgatattatctcgtcactcgtgggatcgagctttttctcgagaagaacttgcgacgatatactcgtccatgctttct

SEQ ID NO: 3576 - DNA, 416 bp, Cyanidium caldarium
  Clone ID: LIB190-071-Q1-E1-G11
agcgaaactggttgctaatttggcaaaggaaatcgaaaagcgtagtaaacaaggcaaatcctcgtttgaagtttggaacgaatgtttagacttggctgccgaagttggaagagcacatacggagttgctaatagcagaactttcggaacagttgatacaacgagctagtgctaccgattcttctgtcggaaacattttgaaacagtgtcaaacgctgtttcttttacatttgattgacaaacagtcgattttcttgcgttataattgcttatctcctccagacgcacaaaagttgcatcgagtactagtcgaactttgtatgcaacttcgagagcaggcactgcctttggtggattcttttggaataccacctcatctattagctcctattgcctttgattggatagaacataaca

SEQ ID NO: 3577 - DNA, 441 bp, Cyanidium caldarium
  unsure at all n locations
  Clone ID: LIB190-071-Q1-E1-G12
tcccggctcgaccacgcgtacggagtaaacagaaaaggaagtaaaaggagggaatgaagggaagttatggcaaaaacacgtgccagcagcagcggtaaaacgtgtgtagcaagcgtagagcagaagaactgggtgtaaaggtcgagtagtagagtaagtgtaaaagggaaaggaaaggagagaaagaggaaagggatgaaatgcagagatctctagagaaaggcaagaaagaaaagaaaggaagacacagtaaatgaggcgagaaagcataggaagtgaaacggattaagaacccgtgtagtctatgcagtaaaagaaagaatgagtaagaaaaaagggagtcattccaccaggggagtaaaggcgcanganagaaacgcaaagcaattgacgggaatcggaaaaaggggtggatcacgtaaattaatccgataaaacgag

SEQ ID NO: 3578 - DNA, 144 bp, Cyanidium caldarium
  Clone ID: LIB190-071-Q1-E1-G3
gagctcaggccaatactcgagaattgcgagatatgaatgtgaataaaccagtcctcattcatgtggagtggcagtagggtcgtggttatcctccagcagagaaagcgttagataagtatcatggtgttaggagttttgacattg

SEQ ID NO: 3579 - DNA, 213 bp, Cyanidium caldarium
  unsure at all n locations
  Clone ID: LIB190-071-Q1-E1-G4
cggacttcgggagactgctaccgaaaacgctagttttttagtggagacgcgaaaatagcgagcgagtataagctttcaacgtgctggccaagtacaagtgttgtgcggatcaggtaagagcgcgttttaacatataacgagagatagatgtatcgtcaacaatagaaactgagagacttttatgcgtcgacgcggggganaagctgttctccc

SEQ ID NO: 3580 - DNA, 301 bp, Cyanidium caldarium
  Clone ID: LIB190-071-Q1-E1-G6
aggaaagccacgttggaactgagaaaaggtccaaacaagagaagtcagcagtggggaaaattgggcaatgtacagggaagtatgacccagtaatgaggagtggagtaaacagaaaaggaagtaaaaggagggaatgaagggaagttatggcagaaacacgtgccagcagcagcggtaaaacgtgtgtagcaagcgtagagcagaagaactgggtgtaaaggtcgagtagtagagtaagtgtaaaagggaaaggaaaggagagagagaggaaagggaagaaatgcagagatctctagagaaa

SEQ ID NO: 3581 - DNA, 379 bp, Cyanidium caldarium
  Clone ID: LIB190-071-Q1-E1-G7
cccacgcgtccgtcttgggtcgtcgcgttttggtgacaaggaaagataaatggtcgtcaagtaggcaacgatatccaactcgcgttatttactaaccacttgtttgtgtgtgtttctatagaacagaaacctgtagtttttcaggtttccgcatctaccccggaaaaggcactcgatttgtgcgcggggatggcaaactcctcatctttagtaaccgcaagtgcagatccgactttcatatgcgtaggagaccggcagagttgaattggacgcagttgctatcgaagaatgcacaaaaggggagagcaggaggagacacatagaggacgtcgtacgcgcaaagttgcggctgtggcgaaaccggtcgaaggcgcgtcgt

SEQ ID NO: 3582 - DNA, 356 bp, Cyanidium caldarium
  Clone ID: LIB190-071-Q1-E1-G8
aagaatagagtcgctggatacggaagcccaaggcattcacagtgcccacaaagaattggaaatgaatttggacacagcgttggcccaacaaaaggagttggacggatatcttcaaacgttggagaatcagttggaaaaatagtttgtttcggtgggcgatatgggatcgacctcagcggattatgaaagagaagaaatgtatcgaactgctaccaaattggcatcggaattggagacgattggaacttcattgagagaagtggcgtccgatatacagcaaatgaacaaaccggcggaagatcgagtagttggagagattggtgccatattggatgcacatcgcaagtcgttgggag

SEQ ID NO: 3583 - DNA, 371 bp, Cyanidium caldarium
  Clone ID: LIB190-071-Q1-E1-H11
acttgaagttggatgaaacaggaacgcggctgattcctcagtttgactttgtttcttatgcagctccagatactccacaatgtggatatctttctaccatcaaaaagaaaagtgataagcctgtttccgcgcaacaagacaaccacagcagggacaacaacaacagtcctaataataacaacaatagtcatcccaaggacgatatacaaaatggagagaacagtgtacaggacattacatctaatcacactatgaacaataataataatagtcataatagcaatatggaatcctatcaggaaccagactatgataaatatattcaaggtagttcataaagaatttttttttacaaccaaaactgacaaaca

SEQ ID NO: 3584 - DNA, 442 bp, Cyanidium caldarium
  unsure at all n locations
  Clone ID: LIB190-071-Q1-E1-H12
tcccggctcgaccaacgcgtacgcccacgcgtccgttcattttgttacatcacctaaagaaaacataagagagaatatataaatgggtcgagtgagaacgaaaacagtaaaaaagtcggcccgagtgatcatcgaaaaatactattccaagctgactctggactttcaaacgaacagaagaatatgcgatgaagtagcactcattccttccaaacgactgcgcaataagattgcatgttttgtaacgcacttgatgaaacgtatccaaaaagggactgttcgtggaatatctcttaaactacaagatgaagagcgtgaaacaagaatggactttgttccagaagtttcagctatagatgtgggtgaagtcaagatcgattccagtgacanaaatatgttggaatcgttgggttaataaaaatctcctaatgtggtggtggaa

SEQ ID NO: 3585 - DNA, 300 bp, Cyanidium caldarium
  Clone ID: LIB190-071-Q1-E1-H5
acggacgcgtggcttggaatcgtcgctggacaagtaagaataacaaggataaacttgcgaaaaattcagcggttcaacaacaggaacgcaaatcggaaccacccaaggagaatagtgttgtaagaaatcagtctcttggaaagcaggtagcgtctcattccaatcctccagtcgacaataagaagcgtgaggagaaacccaaagtggatagtccttcgagggatgcaaaagacagatggaatcatgaacctcctcatccaactaaaaccgctattggagacctgtcacatacaccgacaa

SEQ ID NO: 3586 - DNA, 382 bp, Cyanidium caldarium
  Clone ID: LIB190-071-Q1-E1-H6
aggtcgctgcaggtatgttacgtggtgatgttcaacagacgcattggcttgagcatgaagagtggttaaacgtgacggagacaaacaaagttaaagatgagaaatgtattttaatcgatgttagaaatcctgaggaagtacagtccgaacctgtaccgaatgcacagaatattccagttcgtgatattcgaagtcagcttgataagttaccgaaagaaaaggaaattgctgtgtgttgtcgctcggggcagcgttcttatttggcatccagaatgtgaagtcagctgggttttcatgtgaaaaatatttcgggtggctttctgtcgtatcgagatgtgaaggcaagtgccgagattcgttagtggaggttgagccttgtttg

SEQ ID NO: 3587 - DNA, 351 bp, Cyanidium caldarium
  Clone ID: LIB190-071-Q1-E1-H7
cccacgcgtcggctgaggcgtccgcccacgcgtcggcccacgcgtccgcaagaaagtaaccttcgagtagtccaatcttctttggtggcaagctgtgtcctcattctaagtataatctgtgccattcatgcagtaggaggcgatgagataagaagtttcgagagaggataccaaacagttgcaccaactcagacgcagcaatgtcaaaagatttgtgtcagcgccacacagagtcaagttcaaagttgtatttatactcagagacaggctccgtgcatgtcgcaatgtgtcacagcattgggagggaccggcgataaagacgtggcggaatataagcaggtgtgctgtgag

SEQ ID NO: 3588 - DNA, 386 bp, Cyanidium caldarium
  Clone ID: LIB190-071-Q1-E1-H8
aaaagcctaagagagagtgaattaggcaagcaaaggcatgagagaagtataatagcagaagcatgcttgaagaaaaagaaagaggcaaatacgggaaagcagtaaaagaagaaagagaaaggaaaaaactgagtatcacgaagaaaagagggagtagatgaggaaagaaagatcaaggaagtaagagtaagagaaggagtaatgtgaatgaaagcaggaaagtatttgaagaagagagtgtaaagcgcgtaccttttgcataatgtcccagcgagtgaaagaggaagcaaaaagaaagaaaaagaagtaggcaggtaagacccgaagctagggtatcttatgctgtccaagcgaagtaaggctgaaccagtagctgtggaaaaaga

SEQ ID NO: 3589 - DNA, 200 bp, Cyanidium caldarium
  Clone ID: LIB190-071-Q1-E1-H9
gcgtccggcttgtctttgcaaatctacagctttgtgttcttttccataccatttttcataactgcttgggtcttgaagtcgaaaatctgcagacaaatcaatgacacgaatattggaaggaactcgcgagatatattcttgactagtctcatgtggaagacaacagaaaagaacttgtaaactgtttataagtttggagt

SEQ ID NO: 3590 - DNA, 252 bp, Cyanidium caldarium
  Clone ID: LIB190-072-Q1-E1-A1
cccacgcgtccgagaattagaagccgctctttccaaggcagagaagaatttgtcccaagttcaaaactcggaaactggtgaagattggtttgcacctcgagatattcgcaagagagacagtggaagaggattgaagcttttataaccactattcagtagtagttgttggttggaaactagaaagaatcgtattgctgctgttgatatatatattgtatctttggtattcaaatagtaaaatataatgactgc

SEQ ID NO: 3591 - DNA, 318 bp, Cyanidium caldarium
  Clone ID: LIB190-072-Q1-E1-A5
cgacccacgagtacgcccacgcgtccgcccacgcgtccgggggaagagaggaatgttgctgttgcaatgaggatgaggagctatgatgagttcgcatacgattgtcatcccgattctcgtgggtgtggtaattggctgctctgtcctatattggatatcagctcagacacatgccgagtcgccctctataccccttagaatacagctagtttccgctcgtcgaaaagacagttgtttcgcttacgccgctgctgttgccgtttgcaattctcacatcggaaacatcgatcaacttgctgctggtaaagttcgtccatg

SEQ ID NO: 3592 - DNA, 400 bp, Cyanidium caldarium
  unsure at all n locations
  Clone ID: LIB190-072-Q1-E1-A6
agcccaaccaaacgagaaacggggggaggagcacattttacaggggaatagggtgtgaacgatacaccaagagaaagtgcggtgctttataaggaccatttgatcattctttgcatccttggttttttctattgttgtgttggcagaaatcctacgagataattttggagcatattccaagcgagggaagagtgtccaacgccgtgaaaatcttcggtagcgtcacgtcctatggggatatatatgtgtgagagagagagagagaaaagggggatgcaagctttcataacgaattgcgtggaaaaaaaagcatgatggatagcctaccagcgactttgaggatggcgtcttcacctcctgggtgatcttccaggaaatcngtgacggcgtaaactttttt

SEQ ID NO: 3593 - DNA, 397 bp, Cyanidium caldarium
  Clone ID: LIB190-072-Q1-E1-A8
agcaacgataacacaggtgtctaggcaaaatggatggacaagcaaccaaacagccaaataacaacataaagaatagtatctaatagaatatatctttccaatgaagaacaggagccaaccacacaaaacacacacaccaaaaggatgaaaaacgacgatccattggggttttcatgttgtcttccaccagagacgacatctcgacgagtagtactgtgaaaggtcaagtatgggcagagtctcctgatgaagaaaccaagcagtgtttgcaatctttacgttccaaagtacaatcgatggacttgactccaaaagagttggaatggtgtgacgacgcttgtctcttgagatatttgcgcgctagaaataatcatgtggacaaggctttggagttgat

SEQ ID NO: 3594 - DNA, 342 bp, Cyanidium caldarium
  Clone ID: LIB190-072-Q1-E1-B1
acgcgtcagcacacgcgtccgccttgttgtgtatccttggatggtttccacctcatatcgactagttcgtactacaacagtttctttcaagcgtggattatcgcaagcagtgaaaagcgatcaagctacttctgcttcagaagcgcctcaagtttctagtgggggttccgccttacatccccaggaaatacccaaagatgctgtcaagttttcattgaagccttttgccactcacctcatcgaagctccagaacccgttgcttatgctacgaaagaacagttactggcatatcatcgcacgatgacagttatgaggaggtctgagatcagtgctgatctact

SEQ ID NO: 3595 - DNA, 362 bp, Cyanidium caldarium
  Clone ID: LIB190-072-Q1-E1-B3
cccacgcgtccggcaattttattgcagcggctgagatggacaagttgagtattggttcggtagactttcaaggaaaacgtgtcgtttgtagagtagactttaatgttcctttggataaacaagtaagtattggtgccaatattccacatacacacacacatatatatatatatatatagatggatagatagatggatagagagagactaacttgtgtatatagacaggagcaattaccaacggccaacgtgtggatgcaactcttcctaccatcaaatatatattagaaaaaggagcaaaaagcatcgtacttctttcccatttgggtcgaccagaaggaaaagtggacaaaaagtattcgt

SEQ ID NO: 3596 - DNA, 277 bp, Cyanidium caldarium
  Clone ID: LIB190-072-Q1-E1-B4
gcgtgcactctgacggtatttcaacatggctcatcacagttcatcacgatcgtgtgagagcttcgctttggactgttcatcgcatcctctagacagttattttagtattctctgactctaccagtggattggattgacgtaaaccacagaacatatgcaacgacaacatattctcatgaagggaagtatattgaactgatgcgcttattcagcatcatctgatgtataatgaagtgactatggcacgtgtaaatatatcattgagttcgcgtctata

SEQ ID NO: 3597 - DNA, 359 bp, Cyanidium caldarium
  unsure at all n locations
  Clone ID: LIB190-072-Q1-E1-B5
cccacgcgtccggaagagaaggaagaagcagagagggactatgagcgagaaggtggatagtcgagagggaaaaagcccagaagccaagataaggtatcaaagtaaagaaagaaggaaaaggagaagaagagagggtaggcttagaagcagcaaaccagagaggaaagcgttaaagcatgaaagaaaagaaatccgaaaaagaagagaaaaaggtaagaaagaggaccgaatcagggtaagaggtanaggagcaagaagagaagagagaatgctgggtggagtagcgaaacaagagaagggaagtaaaaggtaagaaagaggaaaggtttacgagagaaggaagtagaaagaagagagtg

SEQ ID NO: 3598 - DNA, 382 bp, Cyanidium caldarium
  Clone ID: LIB190-072-Q1-E1-B6
cggacgcgtgggttcagtttgatcccacgaagagaccttgtgcgaaagaagcgttgcaagatatttatttccgtgatttgtatgaggccgactgtgaacttgttgcaaagcctttgcctcggaacgagtttgcatttgaagcgaagaagctttccaaggatgaaataaggatgttgtttttaaaggagatacttgagtatcatccggatatcaagaacgagcttcaaggctgtgagcttcactatgaacttccttcgcaagcggaagcttttagacaggcagtcaaatccaagttgggaggtaatcggttgagaaactatgagtcgatgccgaaagagaagttgtcgcatcacgtatcgcgtgcttacaatgacatattagt

SEQ ID NO: 3599 - DNA, 382 bp, Cyanidium caldarium
  Clone ID: LIB190-072-Q1-E1-B7
cccacgcgtccgggaccaaaaaatggcgcttagtctcgctgctcgtgtggtttcacggcgccttttttggtattcaaggccttggagactttttgcaactgacgcgggaagtggaaagaatgcaaccgatgccaaacactcggagatggcacaaagtcaaggagtttcggaagctgcgcaagaaagtggctccggggaaactacctcactggaacagaaacttccacctttggacctgtcaaacttggtgaaaggtcgacatccaaaagacaccgaagtgtataaggagtttcaaagaagacttgaagagttcgaagcgtcgttccaagtagagcatgtcccggtgaactttgaagagctgaggaagaaagtgcgttttcct

SEQ ID NO: 3600 - DNA, 358 bp, Cyanidium caldarium
  Clone ID: LIB190-072-Q1-E1-C3
acgcgtccgcacacgcgtccgcaaagctcttccttatattctttgtgcttggacaatggttgcaaagactgctctgagttgcctctttctctctttccttatcgctgccgcagttgcagccgacgtagtttcagaggagagatggggatatgctcagcaaacccaacaacagcaacagtgccaacaagtatgtaaacagtatgcatactatcagagtccagtctgcacttccgtaaccacacagagcccatactggacccaatgctcgaagactgtgcaaacctttgtcccaagccagtgcagtacttatacccaatctcctacatggacctattgcagcacctacaccaccactagc

SEQ ID NO: 3601 - DNA, 319 bp, Cyanidium caldarium
  Clone ID: LIB190-072-Q1-E1-C4
aggaacgttttgtgggtggttggcgtcgggacgacgttggaaatgtccattccactcaacctttgtacaaccaaagaaatacctatctttcaataaacaagttttccctcaaaaaaaaaaaaaaaaaaaaaaaaaaaaaaaaaaaaaaaaaaaaaaaaaaaaaaaaaaaaagggaggaagaacaaaaggaataaaaactaaaaataagcgtgaaagaaaagaaaaaaaaagggggggagggtcaaaaggattcaagtcaagggacgggggaatagaacgtcaaagaccgggaaaagggtgacgtaaatcaatttaaggg

SEQ ID NO: 3602 - DNA, 267 bp, Cyanidium caldarium
  Clone ID: LIB190-072-Q1-E1-C7
agaagctgaaggatgccttgcggttcttgtggtcgggtttctagttgtgcttgtggagaaaagtgtccgtgcgctacgaagcattgtaattgtggtgaccaaaattgtcgctgtggtacaaaatgtagtggtttgagtgctgaaacctccaagtgttgtgaccgttgtcaagggaagacttgtggttgcacgcgttgcccatgtgaagcagctagtaactagaagaagtattgccgtttttaatataaagataattgagtttgtaag

SEQ ID NO: 3603 - DNA, 341 bp, Cyanidium caldarium
  Clone ID: LIB190-072-Q1-E1-C8
agcccaagcgtccgattctgacaggaccccgaatatccttccgttaaaagagccaattcgtggaaatcttcagatttcaactcatgcggtgtatttcccagatgcaactgaaacattcgttctcgtgcgtgaacatttggtagatgaatataaatacgtctttcaaatcttcttcggataagcaatattcaaaggaagatgagaaagaaagtttggattaaatgccggagatattgttttaattggcttgagatactatcaagacgaagaaaaccgatatgagactagcgtataatccacatgaagctagagcattgaagtctcaatgagaaattccagac

SEQ ID NO: 3604 - DNA, 231 bp, Cyanidium caldarium
  Clone ID: LIB190-072-Q1-E1-D2
agtggagaggctctattgtttatttcgtctgctcaatgcttgcaaagaaaagaaaccgagtccacctatgcctgttgactatattcgttttaaggattccgagaatagaggaccactaggtcatatacctagaagaattcgcaagtattccataacaggttctcctattggaagtgatagaaagaaaacttgggaaaatggcaatggacaataaaacgtcgttgcgattgt

SEQ ID NO: 3605 - DNA, 404 bp, Cyanidium caldarium
  unsure at all n locations
  Clone ID: LIB190-072-Q1-E1-D4
agcggacgcgtggggtcggaggaagaggaagcagattttcgagggaattgtgactcggttgctattccaaagaccaccgtgaacaaagtggctacagaagtacttgccaatgccggtgcgcatctttcgtccgatgccaaagaactattggttgggttttgttctgaattcgtgcaacttgttagttcccacgccaacgaattgtgtgaaaaggaaaacaaaaaggttatttctcccgaacacattttgcagtcgttggaagaactggggtttggagattattgccaagaagtgaaacaagtgtatgaagaattcttggaaattgaaaaggtaagtanggaatatatcgtggtggtggtggtggtgggtgtttgtggagagagagagagctgacggactgtgat

SEQ ID NO: 3606 - DNA, 398 bp, Cyanidium caldarium
  Clone ID: LIB190-072-Q1-E1-D6
ggggaatcgacaagttggaagaaatgcaaggccttactgcaagaaaaggcatcggagtgagtgaataagtgagtattgctgatgaaacgccgttattttacgcaaaactttgattctcgtctcattttttgttcgtctcctaataaagagagttcatcctctgagagtttttccaaagttgcctctaatattcttggaacttgcaacatattttgtgcatattcgggaatagtatggtgccttgacgttgcttctcttcgctttttccaaattggcagccacgaggatgccttgtcagacgtagcgtttggtcaaactgctgcagcaatcagttgttcatatgacggtaaagtgaatatttgggatagtcgttcaccccatttccgctcagttcaaag

SEQ ID NO: 3607 - DNA, 387 bp, Cyanidium caldarium
  Clone ID: LIB190-072-Q1-E1-E3
aggaaaagaagagaaaagccgtactgaagaccgacacaggtactcgaggagaaaggagacccaaattaaggtgagagaatggacgataaggaactaggcaaaaggatatggtatctgcggtagaacatatgaaagaagcagcaccgactgtttagcaaaaacacagcactctgcagaaaagagaaaatgtaaagtatagagtgtgcggcctgccaaatagtagagaagaaatcgatgaaagtgaaagcgagtaaaagatgaggtatagagaatggcggtcctaacagtaaggatccaaaggtagcgaagtaaatagacgtttgaaaggcgtccagtatgaaaggagaaacgagtgtagcactgtctagtcgtccaactcagcgaaac

SEQ ID NO: 3608 - DNA, 398 bp, Cyanidium caldarium
  Clone ID: LIB190-072-Q1-E1-E4
agcacacgcgtccggaaaaagacggatgactcgaccacaagttttgttccttccatatcaaaagaccaaatcacgacgagtatttctgaagcgataagatatgaaaaggaatatgttggttttacttggcagaatttatacaaactgttttttgatgcttatcctttgttgcatcctgtgcctttgatagatatcattcattttgctcatccatccaatagcacaattctgttatccgatgctcaatattctgcattccgggaacaattaaaagcgatgggagtgtcgaataatttgagccacatatgagaaaagaagaaagaaaagaatactcgatttgttgctgttggtttgttgcacaactgtaaagtatttcatacgagaagaggagactgtat

SEQ ID NO: 3609 - DNA, 356 bp, Cyanidium caldarium
  Clone ID: LIB190-072-Q1-E1-E8
agcccacgcgtccgcggacgcgtgggtgcgttctttcgttggcccgaagaacattcccattgtcttttagatggcgacaaactggtgtggttcctttcatccaactacacatcggtcttgagagattggggtcagtttacggcagaagaaaccacgcagttgcgtcacttgttgtactttttagaagacattgtgcactcctaatttcctcagaaatgggatgccaacaaccacaatataataccacaccttttttttttattcaaaagatacaaccatgtcgctcgttgttgttgttttcatctcctcctcctccttgctgatataaaaaggcatctacgcagtcgccgtcttcc

SEQ ID NO: 3610 - DNA, 335 bp, Cyanidium caldarium
  Clone ID: LIB190-072-Q1-E1-F4
ccagaaacaaaattttttgcgttgtgtaaccgtagcctgaccgttttttgttcttttgtaaagtttttgttcttgaatgtgcttctgtaaatgtcttcaggtgcagttattggcgggttcgcagcagcttttggaactgcttcggctttaggagttgtaggaattatcgttcatgtgtgtcagtatcaacccaacgctagaatgcgaatattggaacgtagaagaagctttattgagagagctagacaaagacaaagtacgtttccaccaggtcaagagagcaaagctgttgatttggaagagattgaatgttgctgtccacagttgaagtattt

SEQ ID NO: 3611 - DNA, 218 bp, Cyanidium caldarium
  Clone ID: LIB190-072-Q1-E1-G8
ggctcgacccacacgtacggatgaacaagtaagtgttgaatatttcactttgaatatattatatatacgcgtgtatatggactgaatgggcgatatagactcaattatatacaaggaatcaaagttattatagcttatatgaatgaacttgtcaattgctagactcttttcccgctatattccactctaataatataaaaggataaagttgttcttgg

SEQ ID NO: 3612 - DNA, 406 bp, Cyanidium caldarium
  Clone ID: LIB190-072-Q1-E1-H2
ccatcgtatactcgactcgatcgttgcaacgcatattgcaaagcgacatggacaacagtagcagttactcccgaaccacacatacaaatcacatttctcttatctaccaccccatgacgttgaaatatttgtttcaactcttctttatccagtatatcttggccatcttgagttagcaactctacaaacgggatattgatagctgtgtccacgtgaccactaggaactcctgctcgtggctctggttctgttccatgaaaacgaccagaagaacgagcatccaatattacacaatctcttggagactggacatactcttttactagcaactgatcggcaacaaactgtggttgatatcgtggcacaaagtcttgttggtctcggatggcatccaactattatcatc

SEQ ID NO: 3613 - DNA, 401 bp, Cyanidium caldarium
  Clone ID: LIB190-072-Q1-E1-H5
aggaagagtcggaaatatctggcttgaatgagtcaaaagcattgtctccagaagccttttcaagaagattgaaaagtatactggatgaatatcattctttgaaggattcaaaggaagcagtggaaagtctaaaggaaatacctcaagccaacttggaaatgtttgtttatcagtttattcaggttgcattggaaagtagaacagccgtgagaaacgatgctgtctctttgttcacgcttgcaaaagatattatcaccccagagattgtgaaaagcggatttgtatcagtcatagaaatgttggatgatctcgatatagacgatcctcatgcaagcgattttgttgcttcccttgtgggtcgtgcagctgctttgggcatgcttactgatcccagtcaagat

SEQ ID NO: 3614 - DNA, 373 bp, Cyanidium caldarium
  Clone ID: LIB190-072-Q1-E1-H8
agcggacgcgtgggcaactttttaatttgttggaatgcagaggagaactggtcttaaagaacgttgaggatttgaaaaatcttagcatcgaaatcaacgttagtttccgtgatgatcaacctctgttgccccttagtggcttgaggaattcgggaggtgaaaagatggtgtcaattatgctttatttattctcgatgcagcagtcgatgaaggctcctttcacccttgttgatgaaatgaaccagggaatggaccctacttttgagaggaagattgtttccgtcatgattagtgatgcacgacattccacaagttctcaagtgtttctcatttccccgaaattgctcactgatctagagtttggaagagaaac

SEQ ID NO: 3615 - DNA, 464 bp, Cyanidium caldarium
  Clone ID: LIB190-001-Q1-E1-A1
ctggcgtacggtcggtattccgggtcgaccacgcgtccgggacaattttagccttcttttggcaccgttttttgtgggtttcactcgtgtgttttgtctttttaaaactcgaagactatttatttcttgttatgttttagaggtgtttctacagtgtgtttttggaattgtcgtacaccatgcttggtggttggtgaatggctccagtgacaaaaaaggttgtcactttcccaccattcgctacagctccaaccaccaatctgtatacacatacatatgcataaccacatatgtactacacagccgtggtgtaaaaaacgataattcgaatggttgacaaggcttgattgaggtcaaaagactagtgaacgtgttagagaaggtcacttggaaagggggccacttccctgtgtaaatgtgccactagtaactaactaattcctcttgaagagatttcacgtttg

SEQ ID NO: 3616 - DNA, 426 bp, Cyanidium caldarium
  Clone ID: LIB190-001-Q1-E1-A2
ggtcgacgcacgcgtccgcccacgagtccgataggatctacggtatatcgtttttatgaagcagtgacgcactatggagaagcactcaaggcactagtgaatgaaaaagtgtggagatggaatcatgtctgctatcgatatgtatgtatctgtagataaaataaaaggaaggcatggagaagaccgaattgtggtaaaattgaatggcaagtttttacctcaagtagaaggcaaagcagaagatgacacctcttctttgtcctcttgaagatattcgtcatggaagaagatatcggaggatggcgagttggctattctctaatgtggagggattatgtgtgtagagagagaaaagagagtggtggagaatgactcctttttttgtgagtgttgtcatgtgaaaaatacattgttatgattggcaaa

SEQ ID NO: 3617 - DNA, 390 bp, Cyanidium caldarium
  Clone ID: LIB190-001-Q1-E1-A4
gggtcgacgcacgcgtccgtgatgaataagtacattgagaagtatcgtttgtattatagtctggtacgagtgttgttttcgttggcaaaattttgagctaaatagttcatttgaggtatgtcgcctgagtgagttaagcaggtcgttcgaagacttgaaacatcgatttttgaattcctcttctacagaagaaagacagaaactgcgggaacgaatcaaaatacttaaagacaaacatagctccaagtggaatgtaggcactagtctcgtacaacacttagaaaggcagttgatatattacaaaaataaattgaggaacttgtaaaaaaaaaaaaaaaaaaaaaaaaaagaaaaaaaagaagaaaaagagaaaggaggaggagggagaaa

SEQ ID NO: 3618 - DNA, 146 bp, Cyanidium caldarium
  Clone ID: LIB190-001-Q1-E1-B1
ggtcgaccgacgcgtccggcagggtagagtagcgaaacaagagaagggaagtaaaaggtaagaaagaggaaaggtttacgagagaaggaagtagaaagaagagagtgtaaggcggcgtcataatagaaatccgaaaggagtagaag

SEQ ID NO: 3619 - DNA, 401 bp, Cyanidium caldarium
  Clone ID: LIB190-001-Q1-E1-B2
ccacgcgtccgaattttgtcgtttgtgttgcaaagccaacaagcattgagcacaacaatatcgatatgtcaagtggctggaatactaatgtggaacggaaggtaatgggaatgctggtgctggacaagggaagaacaaggataagaagaccagtggagaacttgcaaaagatagtttaaagggtttgggaatggcagccttgtcagcgggtaagctggtttatcgcggtggcaagtggtgtgtggataaggtggaaggcgccattgacgaccacaagtcaaaaggaagtaagagtggcggtggtggaaattcacgttattctcgttgaaacgtaataacttggatagaaacagaacgagacggttttttatatttgttgtgctggataaataattttctgt

SEQ ID NO: 3620 - DNA, 448 bp, Cyanidium caldarium
  Clone ID: LIB190-001-Q1-E1-C3
ggtcgacgcacgcgtccgcccacgcatccgctttgggtatttcagacttatcaagttggaattttccaaacactgaacttttataggtattgtgacagaaagagattatcttagaaagatagtacttttgggacgctcatccaagacaacttatgtaaaggatatcatgacgtctgccaatgatctaattagtgtcaacccttcagcttctcttagcgaatgtatggaaataatgactcagaaaagaattcgtcacattccggtaatagatagtgaaggcaatgtgaagggaatggtatccataggagatatcgttagagaactagtcgaagaacaacgacatgaagcgaagaaactgaatgaatacattcaggggacttattaagatgggctccttcgaggcttgaagtgcttttgttgatttgtgcacagaataaacatttgtgtg

SEQ ID NO: 3621 - DNA, 401 bp, Cyanidium caldarium
  Clone ID: LIB190-001-Q1-E1-C4
gggtcgacgcacgcgtccgcccacgcgtccgcccacgcgtccgaccagacgagaaagttacctttttgttcctgttcatcatttcgatcaaggagactggtgtcttttaatagcaagtgtgttttctgtagttgtgacaacagttattggaaggggcaagttggagctttgtgacaggtgtgctggactgggtggagctcagtgttttgtttgcaagggtaccggagttatctatttggaagagggtacaaaaaagtgtaaagcttgtttcggacgaggaaaaatattgtgtagacgatgtaaaggaactggatattctaaaatgtggttttaacagacttgctactgtgagggtccccgaaacaaataaaacaacgctaacccgataagggtcatcccag

SEQ ID NO: 3622 - DNA, 323 bp, Cyanidium caldarium
  Clone ID: LIB190-001-Q1-E1-D2
gtcggaattaacgggtcgacgcacgcgtccgcccacgcagtcggcaaacaactggaagcaggtttatattccataatgtcctctgagttggatgaagatgaccatcccgagcgacaaataatcggatctattagcttagcagatgcagatgaatgacagggtaagagacataatgctcgattctcctttgcaaattcctttatacaggtcagaagcttatcgatatttctatacatctcgtcttgtcgcgaaccaggaagaagaacctaaagaaaagataaagctaagaacggcgatgtcttcctagaacaagagtattttgg

SEQ ID NO: 3623 - DNA, 467 bp, Cyanidium caldarium
  Clone ID: LIB190-001-Q1-E1-D3
gcggccggtccggaattatcgggtcgacgcacgcgtccgcggttgattaagaaaactggtggaactgttcaacttgcttcgttactaaattcgttctttgctgaggtttttgaagtctcgcctgtgtacgatgccagggagaagatagtgaactttgaggtgacagactctcatggcatatcttttcgagaccgaatatctattttgtatgtgactccattgacaagagaggacgcgaaagcagacagcgctccagattttgtagagtttcttacttttgacaactttcctggttacatgcagtcttatatagatgtagggcgaaacgtacgaagcaggcgcagctcaccaagtcgaagtcctgtcaaacggataaaatctgaaggaagttgagagttgaatgtcgatgtatagacggccactagcggccacgacggtccgcagtctcgttaagaaataactcacta

SEQ ID NO: 3624 - DNA, 363 bp, Cyanidium caldarium
  Clone ID: LIB190-001-Q1-E1-D9
ggaacacggaggacgacagtagcgatgggattgtttagtagactgtttgtgaaaccgagtcgtgtaccgcaaagagtcgtagagtttcaaaagcgcaaggcggaaggctactttacatacaacgccgggaagtacgaccgatacatcaacacacctatttacctgtttgtgtccttcaccggtctttatgcctttattgacggttgtctttgggcggcaggaaagaaggaaagtcaatcgtgaatagcgttttttgtccttgtggacagtcttatgaactagtgattcgtttgttctgccagttttagtttcttgtaatgaaagtttcctttttttccttgcaaaaaaaaaaaaaaaaatgaa

SEQ ID NO: 3625 - DNA, 427 bp, Cyanidium caldarium
  Clone ID: LIB190-001-Q1-E1-E2
gggtcgaccacgcgtccggcattacatcctggtatgactgtgctggacttggaggaagcaaagctttgttaggctcctcaattttgttcggcaaatgaccctgtcaatcttgctggtatggtcgctgcaaatattttacgtggtgatgttcaacagacgcattggcttgagcatgaagagtggttaaacgtgacagtgacaaacatagttaaagatgaggaatgtattttaatcgatgttaagaatcctgaggaagtacagtccgaacctgtaccgaatgcacagaatattccacttcgtgatattcgaagtcagcttgataagttaccgaaagaaaacgaaattgctgtgttttgccgctcggggcatcgttcttatttggcatccagaatgttaagtcagctgggttttcatgtgaaaaatattt

SEQ ID NO: 3626 - DNA, 449 bp, Cyanidium caldarium
  Clone ID: LIB190-001-Q1-E1-E4
gggtcgacgcacgcgtccgcatgaatggaatggcgagcagtcctgcttttcaaaccaatgtcctcttcacacagcgtttgaacagtgtcagaactttaacagtaaacagaaagtcttcaccatctttccgttttacttgtacctcccgacagactcctgctactggaactatcaaggactttgtgaccaaaagagctatttataccctttgctattactttagtgagctacacgacgaattttctaagagatggctccttcaattcgaaaattttggtgaccaaggtgaacttagagaaggttcttatgcttatttgttgcgactgtttaggtcgcctatgcatatttttgaaatttcaagtggacctgaccctcgctatcactcctatagtcgcacttttgaaatacaaataagttcatcctctattgcaattcggttaatgagagta

SEQ ID NO: 3627 - DNA, 439 bp, Cyanidium caldarium
  Clone ID: LIB190-001-Q1-E1-F1
ggtccggaattcacgggtcgacgcacgcgtccgagaatatgaacctctttaccgagactttggtttgggtacaactatttggtcacctttggcttggggtatcttatctggaaagtacagtggaaagaatattccagaaggttcccgactgtcactcgagaaatacaaaggattgaaggaagtagcttttacggaacgagagtggcagattgagaagaccgatcagttgaagccacttgctcaagaacttggttgtactgtagctcagttagcgattgcttggtgtgcagcgaatccccatgtatctaccttgattactggagccacaaagttgcagcaactagaagagaatttcaaggcaatggatattgttcccaagttgacaccggaagtaatgaaacgaatcgacgacattgcacagaccaaaccagactacaat

SEQ ID NO: 3628 - DNA, 444 bp, Cyanidium caldarium
  Clone ID: LIB190-001-Q1-E1-F10
ggtacctagtctagaattccgggccgacccacgcgtccaaaaaaaaaaaacaagaaaaaaaaaaaaaaaaacacttttagagataatgtaatgaaattagtatgtccatggcgtttggctccaatacctgtaataggtattcaatgtcttttctagcccatatggatatgttctcgtcttcgtactttgcgatacgagccgaacgatctactactaactagtgtcttgttattcgttcttttgattctgaatgtcgttgtccttataataatgtgaagtaatgcgatgcataacgcagatgcaaccatttctttggaagcgaatggattgaaacctcctttactggtaatgacttacaccatacaaatgggatttgatcgacgaggggaaatgaactgcgaagaattgctgcatatcatcaaggcccaagatccggagatttta

SEQ ID NO: 3629 - DNA, 445 bp, Cyanidium caldarium
  Clone ID: LIB190-001-Q1-E1-F3
cggccggtccggaattcacgggtcgacgcacgcgtccgcaacatacttcaccagataatccagtggttttctttgatgtcagtatagctgaccatccggtgggaagaataaagatggaactttttgccgatattgttccaaagactgcagagaactttaggcagttttgtactggtgaatatagaaaggatggtattcccgttggttacaaaggctgtagttttcatagagtaataaaggactacatcattcaaggaggggactttgtgaatggagacggcacaggttccttgagtatttatgggctatattttccagacgagaatttcatcttgagtcattccggtccaggagtattatctatggccaatacaggacctaataccaacggcaatcaattctttattacttgtacgtcgtgtgagtggttggacggtacacatgt

SEQ ID NO: 3630 - DNA, 442 bp, Cyanidium caldarium
  Clone ID: LIB190-001-Q1-E1-G10
ggtaccggtcaggaattcccgggccgacccacgcgtccacccacgcgtccgcccacgcgtccgcttggcaacgcaaagaatttaaaagtatgacaaagcgacagcttcataaaaatacgcttgaacatcttaaacaacatcgaaccatgttccctgccatcgaagcaaggttcctgattgtaaagacacgagtaaactcagaatcgagtgttttttggacaacaaaaagttctactgagccatcaaagcattcaaaaccaaaagttttggataactttcctgtagagaccctatgaattcctggcaggtgctgttcaaaaatgtaatagaacagtttggcattgaaaccttatcatcttttagacataagcatagaaaggttgcgagtgagtcgacatactaaattcacaggaaattttggacgtctcaagttcaaactgtc

SEQ ID NO: 3631 - DNA, 441 bp, Cyanidium caldarium
  Clone ID: LIB190-001-Q1-E1-G4
ggtcgacgcacgcgtccgaattttggcgccttttgccgacatgtcgaagaagaaaggcctctcctttgacgataaaagaactagaatgttggaaatattcacagagtcaaaaacctttttcactctcaaggaattggagaaagtagctccaaagcaaaagggcatagtgttaccctccgtgaaggaagttctccaaagtcttgtcgatgacgacgttgtatccagtgacaaatgtggaacgcaaacagtttactggtgccttccaagccaggctgtacaaaagaaacgtagcagaattgcttccttaactgaaaaattacaatcaaaatccgaccagaagcaacagttattagaaaaacgcgaagaacttcgcaactgtcaccaagatactgaggagaggacacaattaattgagcagataaacgcacttgaatctcaaat

SEQ ID NO: 3632 - DNA, 432 bp, Cyanidium caldarium
  Clone ID: LIB190-001-Q1-E1-H12
cccgggtcgacccacgacagtcaggatgctcgaacagctagatatgcgacgtgatgttcaagagatttttcgtatgactccgcataataagcaggtcatgatgttctcggcaactctatcgaaggaaattcgaagtgtctgtaaaaagtttctatccaatcctatggaagtttatgtggatgatgaagctaagctcactcttcacggtttgttgcaatattacttgaaattggaagagcatgagaagaatagaaaattgatggatctgctagacacactagagtttaaccaagttgtgatttttgtcaagtctgtgcaacgagccaatgcgttgaataagcttttggtggaatataactttccgtccattgcaattcatagtagcatgccacagtcggaacgtatctcaagatatcaaatgtttaaagattt

SEQ ID NO: 3633 - DNA, 466 bp, Cyanidium caldarium
  Clone ID: LIB190-001-Q1-E1-H4
taccggaccggacttctcgggtcgacccacgcgttcaagatatcgaaatctcggattctcacttctcgattgttcctcattggcttttacagcgcagttgcctgtatcttaacaggatgcattggcgaatcatcaaatagtttgcgaaaaaatgttcgtgtcttactccgtacctgcaagaaacttaccggctttggcacgtaacttttccaatgtctgtctctcgaggagtggtctgagagggggatgtttacgaaatgtgaaagttttcaaccacaaacgacctgcaaggttgttatctacgaaaatgagaggaggcgaccatgaaacgagagaacttagtcgtcctatgcgtacacttgattccgctttcgacgaacttttagcttttgcgcacgatccctggtccatgtttcgctctccatggagtctgtcgcccataagtatggcagtagacacgtggatg

SEQ ID NO: 3634 - DNA, 461 bp, Cyanidium caldarium
  Clone ID: LIB190-001-Q1-E1-H7
taccggaccggtagttccgggtcgccccacgcgtccgcgagactggtaagcatgacgtctatttgggaggcatccaaagaacgcgtttatcattacaaaaacacagttccttaccacttaaaggttatcgacgcttttctcttgtatgtcttttctactgctgccatccagtttgtttacgtcttgttcgttgggacctttcctttcaacgctttcttggcgggtttcttctcgtgtgctggagtttttgtgttgacaggtaaataatacagggatactatatagctgcggttttttccctcacgttatttatctagtggccttgcgcatgcaagtgaatccgcggaatcagaactcagccaatcgatgggaaaaagtgaacccctaccgtgcttatgtagaatggctgttttgtaacttgattttgcatattgctgttatcaactttaatggatgagaga

SEQ ID NO: 3635 - DNA, 455 bp, Cyanidium caldarium
  Clone ID: LIB190-001-Q1-E1-H9
caggtaccgagtctagaattcccgggccgacccacgcgtccacaatacgctataccaagcggaagatcttcctttcgagattgagaaaatgccagatatctacaccaaatttcgagaaagtgtggaagctggtgggaagataagagaaccgttggaacttagtgaaggatttccacccagaccacgttgtgaacctggtgaaattccaacgcttactgaccttggactagatgcatcccccgagcgagtacctggtgagtcgaatcctcgtagcatacatggatttagacgaggagaatcggagtcgctgaaaagaatggaagattatctttctgaaatgagaagtaccgaaatcaattctaccaacgcaggagcgtatttgggtgctgatttctcttgcaagatttcgccttggcttgcgttgggatgtattagtcctaggaagatatatcacg

SEQ ID NO: 3636 - DNA, 435 bp, Cyanidium caldarium
  Clone ID: LIB190-002-Q1-E1-A4
cgtaccggtctagaattcccgggcccaaccaagcctccaggttcccgaaggaaattttttcaacatcgggaatttcgaaaaagttgggtttccattaaggaaacttttggaaggccttgagaagtccttggtacagatttcagcaaatgccttatcgttgacaattctccccaaacgtatggtttgcaagtggagaatggtattcctattaccacatggattgacgatagacaagatagagaactgttaaatctaataccttttttgaagcagctttctgtctgtgacgatgttcggccaattttgagtacgcgacttcatcttgctgatctcgttgcacgttatcgcaaattgatgtatttgaactcgttcgatacattccacatggacgatgagaaagatatgtgtgtggcggtgacctgatactttttcggt

SEQ ID NO: 3637 - DNA, 213 bp, Cyanidium caldarium
  Clone ID: LIB190-002-Q1-E1-B1
aggaggcaaatacgggaaagcagtaaaagaagaaagagaaaggaaaaaactgagtatcaggaagaaaagagggagtagatgaggaaagaaagatcaaggaagtaagagtaagagaaggagtaatgtgaatgaaagcaggaaagtatttgaagaagagagtgtaaagcgcgtaccttttgcataatgtcccagcgagtgaaagaggaagcaaaa

SEQ ID NO: 3638 - DNA, 418 bp, Cyanidium caldarium
  unsure at all n locations
  Clone ID: LIB190-002-Q1-E1-B10
gacccacgcgtccacccacgcgtccgcgtaaatattgtggcggggggcccttgggaacccttaaaataattacacaaactggccggtaaccctaaactggaaacacaatggaccttggaataaaaccaccaaaggcttccccggaaggcacggccaaaagtagcaccaccgaagtaactataaaagctgcggaaattgtaaacttggtgtacatttggcctgggcgtccccaaattggacttgaaacaaatcgccattaaagcaagaaatgcggaatataacccaaagcgttttcaagctgtcatcatgcgagtaagaaagcccacaacaaccgccctcatatttagttcgggcaacattgtggttacggnggcgaaaagcgaagaagaatccaagcgggccgccaaaaagtttgtgt

SEQ ID NO: 3639 - DNA, 450 bp, Cyanidium caldarium
  unsure at all n locations
  Clone ID: LIB190-002-Q1-E1-B11
ccggtctagaattaccgggtccgacgcagcgtcagaaacgaagtcttcctcctcctcctccggctcttcttcttctggttcttaaaaggcttcaagtgcttgtctctcaaagaaaagatatgcttcctttatactagttactggaaatttgcttgcacaccctcatgtgataacgactcctcgcaagacctctcgttgcttcttagggcaacgaaagcgacaattgtctttcacacatactatatctcctcgttggacgatgaacatctttcaacgtttctttcgcatcatccgtgccaatgtgaaccaattattatctggtatggaaggaccaagaaagctgatcaacaaacagttgacgatatgaaaagtgacttggtgaaagtccgtcaagcttatgcagaagtagcagcaagtcagaaacggctanaaaaacagcgtcaacaagca

SEQ ID NO: 3640 - DNA, 419 bp, Cyanidium caldarium
  unsure at all n locations
  Clone ID: LIB190-002-Q1-E1-B2
taccggtctatagttcncgggtgcacccacgcgtcaggtggtgtattgcattttgcgttggattgccaaagccatggaagaacatgaatagcgcattttagaaaaggactgttttatggaaacttcctcaggcttgttgtacggtttggcagctggcgtaacttatggtgtcatatacaactttgataccggttttgagaacgatcctcgagcaataagctttgagccgttacagccatttggtgcacaggtttaacaggccacctctcaagtttcatggtgctgccaatcgctttcaatattctccacaacgctgcctccaccggagcgctggttcttgcaggtacctttgtcgtagcacatgctccatagcaagatacttttgtaaatgatttggatccctgtggattagaacgtat

SEQ ID NO: 3641 - DNA, 431 bp, Cyanidium caldarium
  Clone ID: LIB190-002-Q1-E1-B7
taccgtattaggaattcccggctcgacccacgcgtacggacaagagcaacaacaacacagtggagggacaaatattcgtagaatggaacaaatattgttggagagtcaaaacaaagcgcttggacaggtgaaaaagggagccttgtctataaggtcgttgaaccacgtttccttttctgtacccgaaccagtgaagacgggcaagttcttttgcgagattcttggctttcgagtggttcgacgacccaacttcaattttgacggtatatggttgtacagttatggtattcaaatacaccttatctaaggtgctgctctcgaaagaccaaatatcttgaaaccatgcacagaccatatatctttcgaagcggatgacctcacaagtatacagaatatattggacactttaaatattccgtatcttttggagt

SEQ ID NO: 3642 - DNA, 342 bp, Cyanidium caldarium
  unsure at all n locations
  Clone ID: LIB190-002-Q1-E1-C2
accggtcagtaattcncgggtccacccacgcgtcagaattcatttggcagacgctgttccttgggatgatgactttacttgtttttggcaaggctctattcaatttgcgagatatttcaggcttctttttggctccacacttgttgtacggtattgtaggaaatagtgcgagtcctggtttagcggaattgaggaaacatcttctatgaggtattggctcattacgtggatattctacggatgcgctaagtactgctatatgttccttacaatacgctgtggaactgcgttttcaaccatgtcgacgatgttctcggcacttgaatttatgattgtttgggt

SEQ ID NO: 3643 - DNA, 217 bp, Cyanidium caldarium
  Clone ID: LIB190-002-Q1-E1-C7
gacccacgcgtaagcgaacctgtaggacgctgctggtgtaggttggttgattctgtaaccactgctagcaggcggaatagtatagtagatgtttctcaacatagacctggctttacacggaaaccttatcacctatggattcggattaagagtttcccaactggtttcgagtacatgtataacgtctcagtgagctcgaatacacaatgagggtcgt

SEQ ID NO: 3644 - DNA, 339 bp, Cyanidium caldarium
  unsure at all n locations
  Clone ID: LIB190-002-Q1-E1-C8
agggctgtggagagcgaaaaagtctttgcagtggaggtccttttgtgaccaaacttccaaaggatccgagtttccttttgataagccgcttttaaagtggaagccgttggaaaaggcggaagaagaaatccttttcaacgataggttgcgtcttgtaacagactgcattgctttgggtgcaactggtttcgtgatctataaaatgacttaccgttttctctatggtcctcctgagcgatgaaactgttagttttaatatatgcgtttagaaaactttgtgtggaataaagattggctctagttgtcgacttgagggttttctcgacgacagaaaanann

SEQ ID NO: 3645 - DNA, 391 bp, Cyanidium caldarium
  Clone ID: LIB190-002-Q1-E1-D6
taccggtctagaattcccgggccgacccacgcgtcaggctgcagtcaagtggatgggttttcagttcaacttgatcaacgaaccatccaatgtcttacaagttgttaaacatttacagccacgtcagcttgttcctttgatgaataatgacttgaatatcagtggaatactttcttatgtcatcgcctccaaaggtagtttagaagagtttgaacgttcgattcgtgcttctggttggagaacccaagtactcaagccagtgataggagaaccctgtcgattactgaaagaagaaagttcatatcgagttgttggagcaactgtctgtccatctcctcaggaacaaacttaaaggctgaaaataaaacccacggtctctgctatggaaaac

SEQ ID NO: 3646 - DNA, 399 bp, Cyanidium caldarium
  Clone ID: LIB190-002-Q1-E1-E1
taccggtctagtaattcccgggtccacccacgcgtccgcagggacaagtggctggttccaaaatatttgtacgcgatcttctggtgccacctggtgtacagattgtggaatcccaagaaatggaaatgttctatttgaaaccggaaagagaagacaaggaagctatggaagagggatcttaaagtgcattccaatagagattgactcgatgaaccaatcgaagtcccatttcataactcgataaggagatgattccactaggaactgttcgaaggagactcgtacccattccctatatatatatatatttaccacacacatatatataaataaccatagaggatagataggatattcgatgtgattaccttgtaaaatgccaacgctccttcctgtcgc

SEQ ID NO: 3647 - DNA, 305 bp, Cyanidium caldarium
  Clone ID: LIB190-002-Q1-E1-E4
gtaccggtctagagattcccgggtccacccacgcgtccgcaagctgcgattgcagtggcaaagaaaggagctaaggccaacacgaaaaagctcaagaacgaaaatttaaagaataataacgaacgttggtggtcaaaaaatcctggaaaacgaccgggttgggaaaactatcaaaaaaaggtctgcaaacacgcccaaaacgtatcaaaagagggcaacatctgtttttgaaatgttcaagaaaaagtagtagtagttcctactcacgtgttcttaaaatatacttaataaattcaacagttgcc

SEQ ID NO: 3648 - DNA, 432 bp, Cyanidium caldarium
  Clone ID: LIB190-002-Q1-E1-E6
ggtaccgttatggaattcgcgactcgacccacgcatcagcaggatgagtgtcaggtatctccaaatttgtgcaacggcttcaagaagtcttttgtcaaaggaatctaaagggttttgccgatatttgcacgctacgaaagtctctcaggcgtctaatgtgatgtgccgagatgcccttaacagtgcgcttgatgaagaacttgaacgagacgaaagagtttgtattattggagaagaagtaggacagtaccaacgcgcctacatagttactcgtggcttgtatgaaaaatatggttcaaggagaatagttgatactcctatatccgagatgggtttcaccggtttggctgtaggagctgcattcaacggactaagacctgtttgtgagtctatgaccttaaactttgcaatgcaggcgatcgaccagatcat

SEQ ID NO: 3649 - DNA, 454 bp, Cyanidium caldarium
  unsure at all n locations
  Clone ID: LIB190-002-Q1-E1-E9
agtacggtctagaattaacgggtcgacgcacgcgtccacccaagcgtccggcagtanactagcagtacgggacggaaagaccccataattcttgactagataggtttaaggaggagagagaatcatgaagtacaggacgtggggtaagagatgaaagaccactgcatgaggataaggaatctaactgagtaaggaaaataagcttaagctagtttggctggggaagtaaagcctaagaaagagtaaattaggcaagcaaaggcatgagagaagtataatagcacaagcatgcttgaagaaaaagaaagagatttcagaaagggaagaaaagtcagctatagagaacaggtgaatgagaactcaaaaagaggagagcaccgaacgatcgaagaagaaactttgggggtaacaggttaatgtggtgttagagaacgtatcaagcaccacgattgac

SEQ ID NO: 3650 - DNA, 420 bp, Cyanidium caldarium
  Clone ID: LIB190-002-Q1-E1-G12
ggtcgagccacgcgtcaatagatatttgcagttttacaacagggtagcacgtgatattctttgtgatactttatcggagttgtactttacgtcaaatcgtctaactgaactgtcccacaagttgaagaaagctataaggaagggtgctggtggagatgaatattttgaagagttgtttttgggtttgtgttttaattctcgtccagacatccagacttattcacgagtgagcagtcggactatctattttcagtccaatgttttatatcgttttgatgggaagtgttttgatagacgtctgtctagcataaagatgagctgctggataaaattcatcagaaattatcttggcttcgattatgcttacgtagatatgactgacggtagatggatgttgtgtcctatgcaggtttctgtttc

SEQ ID NO: 3651 - DNA, 356 bp, Cyanidium caldarium
  Clone ID: LIB190-002-Q1-E1-G3
acgtaccggtctaggaattccggctcgaccacgcgtcaggctctcagatgcagacaagataagcacaaagttgttttatttattatttgggcgatgatgagttcgcgcggtctcgttcgactgatagctgctgcttgtgaagaagctatgcgaacatgcaccaccaactgagccaaactatcaacgtgtcatttattttcttttaagatacattttgcgaatagaaataattatttttgaggaatagcgtgtataattgaatacttgttagattgccagtagaataaatacttgacgaattggttgtggttaaaaaaaaaaaaaaaaaaaaaaaaaaaaaaaaaagatcacacaaa

SEQ ID NO: 3652 - DNA, 450 bp, Cyanidium caldarium
  Clone ID: LIB190-002-Q1-E1-G9
tgccagtgacggtctagaattaccgggtcgacccacgcatccaagagagcccatctatccgttttttgagtcttttagaactgttattgagaaacttggagcaggtcccattgagcgaaagtagcttctcagtgcattcgagacagaaactgaatattgactactcaaggaaaggagttgtcggaaattcccagagtgattatcctcaagattcatgcagaggcgttcaatttagccaaactttctgttcattctgtgagtcgctgtaccaagagaatagagttcttaaagagagaatcgctgagctctaagaagaaaattcttctcttgcggatcgaatattttgaacattgttttaccaagaagttttcttatcacttgcagcggcttgcattcgatcttttgttgcatgtgtgacgttgttgtttaagaactagttccactgtactt

SEQ ID NO: 3653 - DNA, 341 bp, Cyanidium caldarium
  Clone ID: LIB190-002-Q1-E1-H2
cccacgcgtcagaatttcttttcgtataagtagctgtggtcacagtggacgacgtcgtttgtgttttgcttgtcattgttgtccagtggttccatggcgtttcacttgttacgagtgaagcgtaaaggtcgtttcttgaactgcacttgaagccaaggcgagtttaattgacgggagttggaaaccacgttgttgcaaaattcttttcaggtgggtatttagcatagtttgactaaggtgtgaaggcagttgtttaccgaggatcttttgtgcgctatgatgtacaaacaattgcaacggttgcttttgaaagaaataaacattatcgttttggaagcacg

SEQ ID NO: 3654 - DNA, 259 bp, Cyanidium caldarium
  Clone ID: LIB190-002-Q1-E1-H6
attatatatgtttttttttttatttgattccgaatttttacaatcaagggaaccaaaagaacgtagcaaaccaaagaatctttcgtcaaaagaatgtttggagtttccggttggaaaactgagtcgttttcccaaaaacggaaactatgccgaacgaatatgaactggatccccagtttatttggaagcaattttggaaaaccgaaacgctgaagtccttgaattggctggaaacgcagctcgtgaaaacagatataca

SEQ ID NO: 3655 - DNA, 425 bp, Cyanidium caldarium
  Clone ID: LIB190-003-Q1-E1-A12
ggggccacccacgcgtccgatatcaagaaacctcgttggataaagttgccaagaaataagaatggtatccactgttttcctatccaaagtacccgttcatctcttcacagacctcttctcatagaggtttcctgcaagctacattcggttgtgggtacaacagtggcttttctactttgtatatcttgtgcttggtcttttaccagcgatcaatctctggtattggaagcttggagatatgtcgataaatattacgtcgatcaaagtattcatccttcgtggttgcaactacgacaaaagattattcgtcaagtcaaccaccaaaatagccacgctttgataagagagatgctatccaaattggatgatccttataccagactattggaaccagaagaatatcaatcgttgaaagcaacggtaac

SEQ ID NO: 3656 - DNA, 412 bp, Cyanidium caldarium
  Clone ID: LIB190-003-Q1-E1-A4
ttcacgggtccacccacgcgtccggacttgaacttttcgtgtatggatgacgaatcgcagtatccttggatggaactagtgcaaactaacttattacacaacagtgaagcagaagtattacaaagttgcgaacagaacttgctggaagaacgtgaatggtttctggacaagaattgtcgttctgttgtgggagctatcttatctgttctttctgtatcaaaaaattccagtgaacaacagcgtgctgccaatctgtttttgtcgttgttgacttgtaagactgaagtacgtttgagagaatcaatcgctgctgtcgccaatcaggatcctaaacgcaagctgtttcaacctttaattgcattccttgactaggacaaacgttctttagcttccacttgtgctcacatcttgt

SEQ ID NO: 3657 - DNA, 433 bp, Cyanidium caldarium
  Clone ID: LIB190-003-Q1-E1-A5
ccgggtccacccacgcgtccggattttggcaatgaaatgcaaccaacaaaagacacaacgcctgtcgttttatttcgttacgatgcacctttggaatacaacttgatccagttattcaaagacctttatgattttcaagagccttgtagagataatataccttggatgtattttgtgcaacgactggaacgactggcagaagactgtcgttctccaatagaaagtgaatatttagagtctctcatgaccgttttcagactacatcactttgtcaattatcaacacatttctttggctgttttggaattatctcgttggctttcttccacacataatagaaaggaaatgagtgaccgcagcaatgcgagcaatgagaaccgcttttgtggtatttgtagaaaatatttatgtcaagtaacgagcgctttgtttt

SEQ ID NO: 3658 - DNA, 402 bp, Cyanidium caldarium
  Clone ID: LIB190-003-Q1-E1-A6
cccgggtccacccacgcgtccgcaaacgcgtccgcccacgcgtccgggagcatcggattgaatttatgggatatcgaattctatatgctacctacgtaaactccaaggatcttttgacttccattctctccgagttgaaccgaacagaaagaaacttgtgggaagtcgatcatgctacccaagtttggaatgcagttgcagtgaacaactggacgcggttcttcgtgctgtatgcacaatgtcctcacctcggcttctatttaatggataagataaaggatagaatacgacagattgctgtcaaccatttgcgaaaagcgtttaaagttgacaatatcgacctcgaatttctctgcagaaattttggattcgagaatactgcagaatgtaaagaatttttcg

SEQ ID NO: 3659 - DNA, 465 bp, Cyanidium caldarium
  Clone ID: LIB190-003-Q1-E1-A7
attcccgggtccacccacgcgtccgcatatcacgaacagatgtctgtcggtgagattactagttctgcatttgagccttcgaatatgatggccaaatgcgatccaagacacggaaaatatatggcttgctgtttaatgtaccgtggtgacgtcgttccaaaggacgtgaatgcagctgttgcttctatcaagacgaagcgtactattcaatttgtagactggtgtccaacgggattcaagtgcggtatcaactatcaagctccatctgtgatccctgactcagaattggctaaagttcaacgtgcagtctgcatgatttccaacagcactgccatctctgaagtctttgccagaattgatcacaagtttgatcttatgtatgcaaagagagcatttgttcattggtacgttggagaaggtatggaagaaagtgaattttccgaagcacgtgaggatcttgccgct

SEQ ID NO: 3660 - DNA, 379 bp, Cyanidium caldarium
  Clone ID: LIB190-003-Q1-E1-A8
ttcccgggtccacccacgcgtccgcataagaattgaaaggacaaggtggttgtgttccacagctcagtcaaccgcgcgtttctcagtttcgactacaagacgttggtcttcctaaagactttcgttaaacttcattttcacgtttaacgggctgatgatgtaaagttcctcacgcagaattacaaggtcgcttgagtcgttttttgccgcaaccacacagttgtatcccgagttacagatttggttcggattgctctctccattcaagcgatctatctgatgtgtacttatcctctacaagagactttttcattcacgctcgtggaatacccttatactatggcaatattggatcagctaacgtattgtctgatttgta

SEQ ID NO: 3661 - DNA, 428 bp, Cyanidium caldarium
  Clone ID: LIB190-003-Q1-E1-B11
cggtccgagattcacggggccacccacgcgtccggaagtaaatagacgtttgaaaggcgtccagtatgaaaggagaaacgagtgtagcactgtctagtcgtccaactcagcgaaacagcaataactgtgaaaatgcagtaaactagcagtaggacggaaagaccccataattcttgactagataggtttagggaggagagagaatcatgaagtagaggaggtggggtaagagatgaaagaccactgcatgaggataaggaatctaactgagtaaggaaaataagcttaagctagtttggctggggaagtaaagcctaagaaagagtaaattaggcaagcaaaggcatgagagaagtataatagcagaagcatgcttgaagaaaaagaaagagatttcagaaagggaagaaaagtcagctatagagaac

SEQ ID NO: 3662 - DNA, 440 bp, Cyanidium caldarium
  Clone ID: LIB190-003-Q1-E1-B2
ttcacgggtcgaccgacgcgtccgcccacgcgtccggcagaaccagcgtttgatctcgttggaaagagagtccaagtcttcattagaattggaactagcagaggagcaagtagaaaagaaacagttcgaatgtttcttacagcatattcgattggaaaggttggaaaaaaatgtaatatttatagaaaatgagtggagtagtggtcttattagtatgcagtgatagaagttgttggcacctttattaaaagccctcagttgggaagaaagatcctggaggacggcctccgtgcgaatagccactgactcgttgcggagccaagcgcttagcgccgttaatactttgcgagttcaagactctagagatatctatgtcttggtatagagcacagctcgcactctccatactggatgcacaactagaactttccttcgttcgc

SEQ ID NO: 3663 - DNA, 465 bp, Cyanidium caldarium
  Clone ID: LIB190-003-Q1-E1-B6
cgggtccacccacgcgtccgcagacgcgtgggttcatatgcaagaaacggagtttttgcttcatggaggcgatattcgttggcttgagtccgatgagaatgttccaccaaaacttttagttattcgtgaattgaatgcaatcttagctcatcaaccttggttattgaaaagtgagcacttgcaaagactagctcatccagcttcctctttgggtggtcaagtttcgtggtctctaagtgaatgtgttttggctattctcatatttagccattttcactcgttggcaggttttattgaaggatgtggactttgtccagatattgatatggatagcagagattctcttgtacgtcttttattgacacgagaacaggatggcggtggaacagaagaagaggagatggcaacaaagacaaatgatgctttacaatcacctccatccgaagtggaagctactcgacagtt

SEQ ID NO: 3664 - DNA, 364 bp, Cyanidium caldarium
  unsure at all n locations
  Clone ID: LIB190-003-Q1-E1-B7
aagctcttccttatattctttgtgcttggacaatggttgcaaagactgctctgagttgcctctttctctctttccttatcgctgccgcagttgcagccgacgtagtttcagaggagagatggggatatgctcagcaaacccaacaacagcaacagtgccaacaagtatgtaaacagtatgcatactatcagagtccagtctgcacttccgtaaccacacagagcccatactggacccaatgctcgaagactgtgcaaacctttgtcccaagccagtgcagtacttatacccaatctcctacatggacctattgcagcannctacacaccactagcgtaccatctcaatgcagcaaggccgtgac

SEQ ID NO: 3665 - DNA, 389 bp, Cyanidium caldarium
  unsure at all n locations
  Clone ID: LIB190-003-Q1-E1-C10
gggtccacccacgcgtccgaagaaatcgatgaaattgaaaccaattaaaaaatgaggtataaaaaatggcggtccaaactgtaaggatcaaaaggtaccaaattaaataaacttttgaaaggcttcaattataaaaggaaaaacgattgtaacactgtctagtccgtccaactcagcganacagcaataactgtgaaaatgcagtaaactagcagtangacggaaagaacccataattcttgactagataggtttagggaggagagagaatcatgaagtagaggaggtggggtaagagatgaaagaccactgcatgaggataaggaatctaactgagtaaggaaaataagcttaagctagtttggctggggaagtaaagcctaagaaag

SEQ ID NO: 3666 - DNA, 434 bp, Cyanidium caldarium
  unsure at all n locations
  Clone ID: LIB190-003-Q1-E1-C4
cgggtcgaccgacgcgtccgggaaaggagagaaagaggaaagggatgaaatgcagagatctctagagaaaggcaagaaagaaaagaaaggaagacacagtaaatgaggcgagaaagcataggaagtgaaacggattaggaacccgtgtagtctatgcagtaaaagaaagaatgagtaagaaaaaagggagtcattccaccaggggagtaaaggcgcaagaaagaaacccaaagcaattgacgggaatcggaaaaaggggtggatcacgtaaattaatccgatataaaccgagaaccttacctctccaagaaggtgttgcacggctgtcgaaagaacgtgctgtaaagaatggaacaagaacgaaaaanaaaaaaaaaaaagaaaaaaataaaaagaaaaagacaacaaaaaaaaaaaaaaacacacaagtgaac

SEQ ID NO: 3667 - DNA, 442 bp, Cyanidium caldarium
  Clone ID: LIB190-003-Q1-E1-C9
cggtccgagattcacgggtcgcaccacgcgtccgggaatgcttcatgtggcgattgacgttgctgttgcgataacagagtgcgaattgtagacacattttccacaaaatctacttcccaaagcaaggattctctaatcgcatcactgatcatcggactttgcaaccacaatagcccactttaacggacacttccgaagcaaccacagaattctcggccacaatcttttttaccgatccttccgtcgatcaaccgttggaaccttttgtggatcaaaatatagctgaagatatcacattaccctacgaaataagtaaagaatgggggaacaaattgggtaccgtatgaaataatttggggtattgtttaccacaatgaaaagatcgacgacaattgcgagtacaactcattctaaagctgcaatcaacaacacggattgtgct

SEQ ID NO: 3668 - DNA, 410 bp, Cyanidium caldarium
  Clone ID: LIB190-003-Q1-E1-D10
cgcgtccgcggacgcgtcggccgacccggcagctttggcccgcaaaaaaggtggtgcacggctgtcaaaagaacgtgctgtgaagtgagagaacgtacgagaaagccaagtgaggaaaagaaggcaagtagagggcggcccgagaaaggagagggcgtaagacgtgatacagagtaggaagaaaagagaagagagctagaaaggaggtaaaagaagagtaaaaggactagaagaggtacggaattcacgaggaacgagcgtgaaggaaggaggaatcccaagtaatcgacgaagaaaaagcttcggtgaaagcgtgaacggattttgtacacactgcccgtcaagttctggaagtgtgctaggaataagcaggagaagtacaagagagtacgaaaagaagaaaggaagtg

SEQ ID NO: 3669 - DNA, 279 bp, Cyanidium caldarium
  Clone ID: LIB190-003-Q1-E1-D3
tgttttcatggtagcagttgtacattcaacatcatcaaatgccaaagggaggaaagaaagattcttcaaagaaagaagccacaagtaaacctgcagcagcagatgctacaaagacgacagaaaagtctggtccggaagccaagttgaagggaactggtgcaaagaaacaataaaaagttgactatgcatgtgcagtcctgttatgttttgtgagttctgtttgatagtttccagctattcttttggtagtgaataaagagaaaattttttataaaagaa

SEQ ID NO: 3670 - DNA, 277 bp, Cyanidium caldarium
  Clone ID: LIB190-003-Q1-E1-D8
ccacgcaatccgcacacgcgtccgataaggcgctggaatatcttttgaaacaagcttccacgccaaaggttgcttcttcttcataagaaagttatatacttttctccatgtcttgatatgagtcccgttctcttctttttatctatatataaataaatgtgttttcggaatcaagtttcaaggaaaaaaaaaaaaaaaaaaaaaaaaagaagaaaagagaaaaaaaaacaaaaagaacaaggtaaaaaaggggggcggttctagaggatcaaagctt

SEQ ID NO: 3671 - DNA, 427 bp, Cyanidium caldarium
  Clone ID: LIB190-003-Q1-E1-E12
gggtcgagccacgcgtcggccaacacgtcggcccacgcgtccgggagtttttaagaggcatcgacaatcctatcggcatcaagtgtggaccatctttggcagtcgatgatttacttcgtttgttggatattttagatcctgataatgagcctggacgtattacactgattgttcgtgttggagcaggtcgagttgccgaacatcttccaaggtttgtagaagcagtgcgcaaggaaaatagacaagtggtgtggagttgtgatcccatgcatggcactatggaaacatccaaatctggttacaagaccagaagatttgagaatattctgtcagaggtcaaagaattttatgaaattcaccgtcaactccattcctatccgggtggaattcatttggcaatgactggacagaatgtcactgaatgtat

SEQ ID NO: 3672 - DNA, 391 bp, Cyanidium caldarium
  Clone ID: LIB190-003-Q1-E1-E2
attcacgggtcgaccgacgcgtccggcaaagagagcgttacctccgcgcaaagttagttttttgtcacctcaatcggtgaacaaagtcggaagattgtggagtttgagttctcgtgtatctagtttttccgacaagattggttcacagtctcattttctccatttcgtggaccgcagcccagacgcgtctcgtcaccgagcaagtcccaggggacgtgaaagggctgatgcaggtccagtgatgtcaacagcgaaagtttatccggacttcacgttaaaagaacccagggaatatgggactaataaaaccttggaaattggccgaattaacggcaaaaattccaaattggtaacaaaattgggaaagggcaatcacgttaaatttttaaaa

SEQ ID NO: 3673 - DNA, 368 bp, Cyanidium caldarium
  Clone ID: LIB190-003-Q1-E1-F1
gagacaaaacgaatactacatgatgacttccaaaggttgcaagatcccatgtctcaacaggatttactagtggcaatccgacagactgtacagcagttggaacaaatatttacagatagatatccgtcaatgccatcgttttggaacgcgttggatcgaaatgttgcacaaacgtttcgttccgctttgagttgacgcatagaagattcacatgaaggaggatagtgaatgacaatgtgagtgagctgcatggacgatagatcgttggttcttgaaagaaatttacttctagacgagaaagcagtgtgaatttttactaaacagttttactaacaacgaaaattttcgcgcctggataggaattggcg

SEQ ID NO: 3674 - DNA, 444 bp, Cyanidium caldarium
  Clone ID: LIB190-003-Q1-E1-F11
ccggtccgagatttacgggtcgacgcacgcgtccgcccacgcatccgcgtatttcatttcacattctccttgtagaaaactatgaagtctttcggaattgctattgttttcctaagctttgttattgcatcttatgcagcagttgtatccgaaatggcatccaatgagtttcaaagaggaggatacgctccttctccttccaaggaatgctgcatgaccacttgtcaatatgcagaactttgcccaatttctcaaccaacttatagccaagctccatcttacattccatctcctacctatggccaagctccttcctacaatcaatattcttcttcgtacggttcctctagctatcgtctcttaactgcagacgaaaaccaacttgtgagcagaggaggttatgcaccaaccaaccaatgtattctagttcctatccaatgctgc

SEQ ID NO: 3675 - DNA, 416 bp, Cyanidium caldarium
  Clone ID: LIB190-003-Q1-E1-F12
gggtcgacgcacgcgtccgaactatatgccgcagtctacgcagaggaaagtttctggcagttggattccaaagagtctgttgtgaccatatatttggacaaagtgaacaaaatggagtggtggcctaaggtcgttaagtctgagccagaaattgacacttcaaagatagaacctgaaaattccaggttgagtgaccttgacccagagacaagaagtatggtcgaaaaaatgatgtttgatcagaggcaaaaagctgctggactcccaactagtgatgaacttaaaaagaaagaactattagcaaagtttatggaacagcacccagaaatggacttttcacaagccaagttttcataaagaaagacagacgaatggaaaccaaaacaatccgaagaagccagttttcgcgcctggat

SEQ ID NO: 3676 - DNA, 490 bp, Cyanidium caldarium
  Clone ID: LIB190-003-Q1-E1-F7
gcctgccggtacaggtccgaaattcccgggtccacccacgcgtccgattgcctcttgtctcgtaatgtcattgcctagttggatacttgcttcacacaagatagaaaagttggtattgaattggttggaagaggatattcctagttttgactatggtgctcaagcagtaggtgacaagtggacaactgccacactctatgccaagtctcaaggtgtattggcaggcaaaccattctttgatgccatctttcaacatcttggttgcacagtgcagtgggaagagtcctttgatgatggacgttgtttggatccctactttgtatcctcctcaggcgtggaaaatggacttggaggattgttgacgctggcaagaatacaaggaccagcttgtaacatattacgtggagaacgaaccgctttaaatgtattggcacgttgtagtggaatagctactagagcttttggtttgagtcgattggcacaacaacac

SEQ ID NO: 3677 - DNA, 372 bp, Cyanidium caldarium
  Clone ID: LIB190-003-Q1-E1-F9
gggtcgacgcacgcgtccgcgacgggatgcacttgaaaagggactcctcccctccttgcaacttgggctggtaaaaaaactaaactaaccaaataaagtatgtaaaaaacattcttattccttgacaagttttagataggaaactacaaaatcattcaacaatcctataaagtatcacgcctaagagaatgcagcattgaattaaaaaaaaaaaaaaaaaaaaaaaaaaaataaaaaaaaaaaacaaaaaaaacaaaaaagaaaaaaaaaaaaaaaaaaacaaacaaacaataaaaaacaaaaaaaaataaaaaaggagaaaacaaaaccaaaaaaatgaacaaaaaaaaaaaaaggggggcgcccccaaaa

SEQ ID NO: 3678 - DNA, 433 bp, Cyanidium caldarium
  unsure at all n locations
  Clone ID: LIB190-003-Q1-E1-G11
gtccgagattcacgggtcgacgcacgcgtccgggaaaaagagagaggcctcgttgtccttgtcttatggaagcgtctcagcgatggactggtcgatatatccaaaagtgccttctcacttatccatcacttggacagttgagtagtaaatggcgccacttttccacagcaccttgggtacaagatactttggaggaatattttacgtttcctagagagagtgaaagaaataactacgcagtgaattggtcgttggcaaagataggagtgcctccaaagggtgaagttttttacaacgtgccttcgaggacgattgttgccaactcgcctggaaagcttagccgtgagaggaggcacttgttggtcccccatcaaaagacgggcaacttccaggaatttgtcctaggaaataacttganaccgagagaatatgc

SEQ ID NO: 3679 - DNA, 449 bp, Cyanidium caldarium
  Clone ID: LIB190-003-Q1-E1-G2
ggtcgaccgacgcgtccggacatgtcgtcttcgcgtacggttgaagaaattcaacggttgattgcttcagcttttgtagttgttttctccaagtcttggtgccctttttgtgatagagtaaagcagctgtttagatccttaggagtctctttcaaagtaattgaattggatcaggagaaaaacggttcagccattcaaagtgcattgtatgaattgacgaaacagagaaccgttccaaacgttttcataaacggacagcacgttggtggttgtgaccaggttatgcaactggaaagaaaaggtacattgaaaaagttacttgagcctgttttgacggcctaaaatgcgttatctactgcgcagccatatcgttgccgctccagtcttctatttagaacagaaactcaagtcatgaaatttggaaaataaacagccgacattgtctttac

SEQ ID NO: 3680 - DNA, 472 bp, Cyanidium caldarium
  unsure at all n locations
  Clone ID: LIB190-003-Q1-E1-G5
taccaggtccgaaattcccgggtccacccacgcgtccggaatcaagtatgtgtgattgcttcagcttgtggaccgaacaatgtcgaatacgattccacatttactgcatccaattccattgcttatcatgactgtttgggacagtctattgtacaatattgtcgtgtcattcccgatggcattatttgtttctttccctcttatcgtttattagaaaatgtggttcgacgttggcgtcaatgcgatatttggaaagaattggaaaagtgcaaacaagtatttatcgaaccgagccatcatgaccgaggtcatttcgataccattttactctcttattatcatgccattcacaagaaagaaggtgccttatttttagcagtttgtagaggaaaagtaagtgaaggaattgatttcaaggatgagtttgcacgangagtgataattgttggtttaccttttcctaatttgagag

SEQ ID NO: 3681 - DNA, 435 bp, Cyanidium caldarium
  Clone ID: LIB190-003-Q1-E1-G9
gtccggaaataccgggtcgcagcacgcgtccgatatcgtatgttgttggtctggttgctcaaggtgtgaaatggcagtagttgaagataacagagtctttgttggtggtcttccttggtcagttagtgaagaagaccttcgtgaaactttttccaaatatggagaagttgttgatgcaagggtgaatatccgtgttccttttgttttgggttaaacttggctcccttgactacctgcacctattctcgggttcccttttatttgccccatagttagtgtcactatctagtcgcatgttactttgagagggtagagagcttttctagttactttataactgttcacacttgggaaccctcgaaaatagtgtgaaggatatgcagttgggttgactagtgtacaccaaagttgttgttactatatagtgctcacaat

SEQ ID NO: 3682 - DNA, 322 bp, Cyanidium caldarium
  Clone ID: LIB190-003-Q1-E1-H11
ggtcgacgcacgcgtccgcccacgcgtccgcccacgcgtccgcccacgcgtccgcccacgcgtccgcccacgcgtccgaaaaaaaaaaaaaaaaaaaaaaaaaaaaaaaaaaaaaaaaaaaaaaaaaaaaaaaaaaaaaaaaaaaaaaaaggaggatgatataaaaggtaaaaaaattaaggtaggctttcataaaagttcaaatcttttttatggttgaatgtaatttaaaatctttggaagtggttttataaatttaatttctgggagggtctttttaaaagctagtttttgggaaatccttgagatttccctttttaaa

SEQ ID NO: 3683 - DNA, 296 bp, Cyanidium caldarium
  Clone ID: LIB190-003-Q1-E1-H4
tttttcggatttcttttctttcatgctttaacgctctccactcaaggtaagcgttccttgtcgcaaactcaaagttgttttggtaggagtggtgaaggcagcggaggtgacggtggtcgaaagagtagtgaaggtagcgaaggccagggtggatagtcgagagggaaaaagcccagaagccaagataaggtatcaaagtaaagaaagaaggaaaaggagaagaagagagggtaggcttagaagcagcaaaccagagaggaaagcgttaaagcatgaaagaaaagaaatccgaaaaa

SEQ ID NO: 3684 - DNA, 322 bp, Cyanidium caldarium
  Clone ID: LIB190-004-Q1-E1-A1
ctgcccgtacggtccgagattcacgggtccacccacgcgtccgtacaagcttccaaattgtttgaaagtgtgctgtcatgactaagccattttgcattgcaatcgcgactacatttatgtttacaaacatgccttaccgaatgtcatctaccgacctaggtgaacccatgcacagtacgactgcattgtccaacattacccaagcggtcttcttcacagatatcgacttcacatggtctatagaacgtgtcacagttacaagcgctcccaacgcaaactcaatgtcagtcacatttgacggacagttgattaagtcagcatc

SEQ ID NO: 3685 - DNA, 454 bp, Cyanidium caldarium
  Clone ID: LIB190-004-Q1-E1-A5
attcgcgggtcgacccacgcgaccgcaaattccacgactccgatgttgagagcttccgaaaaggcgcgtaaaccacgcgttcatatctttgatggtccttccagtgaagatatgcccttttttatggaggaaataaagaaaataaagttggcagaacttgctatgttgaaaggagaagaagaaggaggagaaaccggccacgcagaagccctagcaggggaagcttctgaaccttggcataacaactgggatgttgctcacttggaacaagaggaaaaggaaatacaagacttgaaagaagaaatagagagacttcaagtcactaagaaggaattgtttcagcaactaaaggaagtcttgatggaagaaaggcgggataagagagagacgacactcccctagttgtgtttgtacaagtctattttacaagctctctttatgaacctttccaact

SEQ ID NO: 3686 - DNA, 476 bp, Cyanidium caldarium
  unsure at all n locations
  Clone ID: LIB190-004-Q1-E1-A7
ttcncgggtccacccacgcgtccgcacacgcgtccgtgaattcagaagcgacctcaggttagtgtactgcgatcattttagaaccccaaatgccctgagtcttgctagttttcttttatagagaagaaaatatttgataagaaggcaggaagaaatgcacgggcactaatatgtgctgaaatatttttgaaatactagattgtgctctatttgatgacgacagaaggcttcttgttctgaaatggccctgtcctgaaaagtcgatatagctaagggataactctaagaggtgtttaatgccttgtgttttccaccatatgacacgacacttgttgaaaagaatcagctgccaaattgtgttttggattcgttgtgttaaagttgttcagtgcttgatgaacaaagaggttccaaagcctgcaatagaaggagaaaatttactctcactgagaactttcgactgatcagagcaagat

SEQ ID NO: 3687 - DNA, 316 bp, Cyanidium caldarium
  Clone ID: LIB190-004-Q1-E1-A8
ggggccacccacgcgtccgtagggaatttgttttgttgaaccggcaggatttagagaagtatataatcgggtttcctggaattgctggcagtggagtgagcgctggagaacgtgcagtagaagccctgttaaacgaaaccctatatgttaatgtagatctcagggactttccccgttttgatggggaatattttatacctacgcttttaaagaagattagcaaagaagctctttccacgctaccaaataagccagaattgctcgccaaagttttaaagaataagaaagacccaaaaaagtgggtaagccccttaat

SEQ ID NO: 3688 - DNA, 398 bp, Cyanidium caldarium
  Clone ID: LIB190-004-Q1-E1-B1
cggtccgaaattcacgggtcgacgcacgcgtccgggttaccaaagggagtaacgggaacagctttaacctggttcctattgatcatggttttatcttaccagacaaatttcaaagctatccttggcctgtttggatggactggcctcaggtaaaggagccggtttgcgaagatgtaaagagatatgcagaaacgctagacggtgaaatggacgctcgtctgatcttggacgaaacagatggcagactgtcaaagaatagcttaagaattttgcgcataatgactgcgcttcttcagagagccatggagaagaaccttactctgtatgaagtcggttcccttgtatatgtccgcgatcccgacacagaggaaagcgagttttcttccattatgcgagaa

SEQ ID NO: 3689 - DNA, 393 bp, Cyanidium caldarium
  Clone ID: LIB190-004-Q1-E1-B4
ttcccggggccacccacgcgtccgcagacgcgtcggggaacacatgggggaagatataattcaagatgcagtacattgtgctagaccttctgatcggcaaaattgtcctcaacagcgtgcataagtgccagcacaagttgcaccacgttatgcacgaagttttgcacatataccaggagataatccaaggatgactctaaagatgacgcgaaacttgaagcatcacactgagcagcatctccatgcggttcacactgcggtatcgtcgatggattcaggcattgaagcacagttcaagtaacagatcgtttagcacattgttttgcacatgagttacaatgagatgtatatagcatggagtgtaacagggaatgtagattattagcgaaaaca

SEQ ID NO: 3690 - DNA, 478 bp, Cyanidium caldarium
  Clone ID: LIB190-004-Q1-E1-B6
taccggtccgtacattcacgggtcgcagcacgcgtccggaagagattagatagagcacctgtcattgctattaaacgcattcatatggacgagaaactagcaaaagctgcggaatacgccggagctcaccttgttgaagaacgttctgtagaaaatgcagtttttgacaatgtcaaaaaagtatggagggtgaatacagtaaaggaagatggatcgaaagaggaggaaacatatacaggaagaattgttgtttgtgcggatggtgctcctagtcgacttgcgatgaagttagggttggtatcctcacctccacagggtacctgttccagaacctttgtggaaaggaaaaatcaaaatttttggacagacgggcctgtaatttatccaagagatttattgcctggccattgcgcagtttttcgtcaaccaaatgatgaactgaacctttgtccctaaaataatcctggaaatccaaaag

SEQ ID NO: 3691 - DNA, 455 bp, Cyanidium caldarium
  Clone ID: LIB190-004-Q1-E1-B7
ttccgggtccacccacgcgtccgcaatggtgcaaaaatattcgaccactatttgccgcaccactaacgacaagccacatgttgtatgctacaaagaatagctggctgaccattccatctggctgcacgcttctatgtcgtagtgcgtttacccacggttccatagcagcagcttcggaaagcgatccttctaccgctccaatgtcgaaaaataaaaaggcaacgaatatggaaacgcagtcttttgtggtgagcgtgacgggttcagaccgagtaggcatcgtacacgattttagttgggcactgaaaaatatttctgccaatgtggaatcgagtcgaatggcttgtctcggtggcgactttgcaatgattgtgttggtcagtttgaataagaaggatggaaggttgatacagtcgacgttagagtcagccttaccagggtttcaaattagtact

SEQ ID NO: 3692 - DNA, 356 bp, Cyanidium caldarium
  Clone ID: LIB190-004-Q1-E1-C1
ggtccgagattcccgggtccacgcacgcgtccgaatttacaagaagaagaagaagaaacaacaacgacagcacctaaacgagcagatgtcctgaactggatacaagagtttggtaacaagatggatttatttgaaaattaattggaaactttttcagaatacacaaatttcaaataaaacagatattatgtaaattgtttcagaaaggaaaaaaaaaaaaaaaaaaaaaaaaaaaaaaaaaaaaaaaaaagaaaaaaaaacaaaaagaaaaaaaaaaaaggggggcctccctaaaagatcaaaactttggtacacgggcacccaaattcaaatcactgccacgggggtcaccaaaa

SEQ ID NO: 3693 - DNA, 351 bp, Cyanidium caldarium
  Clone ID: LIB190-004-Q1-E1-C10
gaagtcagcagtggggaaaattgggcaatgtacagggaagtatgacccagtaatgaggagtggagtaaacagaaaaggaagtaaaaggagggaatgaagggaagttatggcaaaaacacgtgccagcagcagcggtaaaacgtgtgtagcaagcgtagagcagaagaactgggtgtaaaggtcgagtagtagagtaagtgtaaaagggaaaggaaaggagagaaagaggaaagggatgaaatgcagagatctctagagaaaggcaagaaagaaaagaaaggaagacacagtaaatgaggcgagaaagcataggaagtgaaacggattaggaacccgtgtagtctatgcagt

SEQ ID NO: 3694 - DNA, 355 bp, Cyanidium caldarium
  Clone ID: LIB190-004-Q1-E1-C2
tccgggtccacccacgcgtccggaaagttacagtggcttggtaaaactgcttttcgttagtttttacgtgaaaaaaacccctcttttttgagtgaaataaggctttacgtcatctgtggtcgtaccttaggcatattgtgacatacttgtccagatctagtgaataaactacatttttaaacaaaaaaataaaaaaaaaaaaaaaaaaaaaaaaaaaggaatacaaaaacaagaaaaaaaggtcagccccccgatagggaacgacatagagtaagagtaaagtcaacttgaaacacctgatatgtcctcgactcagagcggctcacaggacgacgatatatagtgacttttcagg

SEQ ID NO: 3695 - DNA, 462 bp, Cyanidium caldarium
  Clone ID: LIB190-004-Q1-E1-C3
ccggccggtccgtaaataccgggtccacgcacgcgtccgcccacgcgtccgcccacgcgtccgcccacgcgtccgcccacgcgtccgcccacgcgtccgcccacgcgtccgggaaaccaggttatgagaacttgtgttctcttgccgtcatttcgaagaccaacaccaacttccgaactgcaggagtttgtagagtgcctttgaaagatagacacggacaaataaccccaaatgttctcacaggatgtatttcttgtgcttcgggtgacggtggtcccatctggtgggacgatcctattccagataatctgttgcaaaaactgaaagagttgggtcagctgcctccagaggaagaagaaaagccgagcgacgacaaggaggacgaaaagaaggagcaagaagagacgcaaccaaaggaggaagaagagaaggaagaaactgttgcaagtgacgagagaccag

SEQ ID NO: 3696 - DNA, 456 bp, Cyanidium caldarium
  Clone ID: LIB190-004-Q1-E1-C5
gggtccacccacgcgtccgaagagtaaaaggactagaagaggaaaggtttacgagagaaggaagtagaaagaagagagtgtaaggcggcgtcataatagaaatccgaaaggagtagaagaaaagagagagaagaaagaaaagaagagaaaaagcccagaagccaagataaggtatcaaagtaaagaaagaaggaaaaggagaagaagagagggtaggcttagaagcagcaaaccagagaggaaagcgttaaagcatgaaagaaaagaaatccgaaaaagaagagaaaaaggtaagaaagaggaccgaatcagggtaagaggtagaggagcaagaagagaagagagaatgctgggtggagtagcgaaacaagagaagggaagtaaaaggtaagaaagaggaaaggtttacgagagaaggaagtagaaagaagagagtgtaaggcggcgtcataatag

SEQ ID NO: 3697 - DNA, 232 bp, Cyanidium caldarium
  Clone ID: LIB190-004-Q1-E1-D1
tgacggtccgagattcacgggtccacgcacgcgtccgcaataaaactatccagcttggattttagttcttgtcgtgaactactaaataaaaaaaaaaaaaaaaaaaaaaaaaaaaaaaaaaaaaaaaaaaaaaaaaaaaaaaaaaaagggcggaagcccaaaaggatcaaaccattacttacgcgtgcatgcaacgtacatatctcttcaatagtgtcacctaacttcaatt

SEQ ID NO: 3698 - DNA, 356 bp, Cyanidium caldarium
  Clone ID: LIB190-004-Q1-E1-E1
ggtccgaaattaccgggtcgacgcacgcgtccgcggacgcgtgggcgtggttggttggggtgagcatgccgccgcaagtagaaacaagtacaccttctggtattgcagtaggcctgaataaaggacacgccgttacgaaaaggaaattttcaaccaaaggactgaaaagggagaaaaaaacacgccaagtttgtacgagaaatcatccgtgaagtttgtgggtttgctccctatgagaagcgaatcatagagttgttgagagttgggaaagataaacgtgcgctcaaatatgcgaagaaagaggcaaatacgggaaagcagtaaaagaagaaagagaaagaaaaaaactgagtatc

SEQ ID NO: 3699 - DNA, 373 bp, Cyanidium caldarium
  Clone ID: LIB190-004-Q1-E1-E4
tggtacgcttgcccgtaccggtccgaaatcacgggtccacccacgcgtccgtatccgagttgtgtcgttgcctcatgggacgtattacggagtgggaacgacccgttcctcgttaaccagttatcgacccaaaacctaaaacgggtaaagtaaggagcaatttggatccaaccgaatacggtagaaatgttttgcctacttccaatgggtgcaataatggtttgacttcagctacaagaacaacaagaacaagtagtgtattcatgggagggctttccggtttttggggctctaaaacgtgggcttatatgtccactataaacaaactcacagggatgaaagataacgggctcggtcgtataccgatcgaaat

SEQ ID NO: 3700 - DNA, 449 bp, Cyanidium caldarium
  Clone ID: LIB190-004-Q1-E1-E5
taccggatcgaaattcgcgggtccacccacgcgtccgcacacgcgtccgagaaagaggcaaatacgggaaagcagtaaaagaagaaagagaaaggaaaaaactgagtatcaggaagaaaagagggagtagatgaggaaagaaagatcaaggaagtaagagtaagagaaggagtaatgtgaatgaaagcaggaaagtatttgaagaaagaggcaaatacgggaaagcagtaaaagaagaaagagaaaggaaaaaactgagtatcaggaagaaaagagggagtagatgaggaaagaaagatcaaggaagtaaagcctaagaaagagtaaattaggcaagcaaaggcatgagagaagtataatagcagaagcatgcttgaagaaaaagaaagagatttcagaaagggaagaaaagtcagctatagagaacaggtgaaggagaactcaaaaag

SEQ ID NO: 3701 - DNA, 472 bp, Cyanidium caldarium
  Clone ID: LIB190-004-Q1-E1-E6
gggtccacccacgcgtccggaaacgtttagagttggagcataggtgtagacggctattgactcgttggaaagaaataggagatgaaataaacaagacaggtactggtagaaagagcagattggagctttgtagacaagagcaagaaacaattatggaagctgtaaaggcagaacggaaagctcttcgagaatggaaagagaagagacgaaattggattcaacgaataattcttcagcacaccaaaacaaccgcagcgaccaaatagacatgaggggacatttggaaattggtttgctgcgtcggtgaagcgcacggaaatattttctagtcatgcaaatatttgtgaaaacgttgacaggaaagaccataacgttagaggtcgaaccttcggatactatagaaaatgtgaaatcaaagattcaagataaagaaaggtatacccctgattaacaaaaaacaacacaaggcacc

SEQ ID NO: 3702 - DNA, 292 bp, Cyanidium caldarium
  Clone ID: LIB190-004-Q1-E1-E7
attcgcgggtccacccacgcgtccggatctatgggagaaacttattatcctgagcgaaagagtcaagaaacattagacgctgaagaacttcaacaaaggaagagcatgaataagtcgagttcggaacgaccaaaagaaaatgttgcagctgcatcatagttgagtttgtttctatcataaacttattattcaacgtggcgtacttgtttacgttgttccactttgtgtggttttttctttaaaaaaaaaaaaaaaaaaaaaaaaaaaaaaaaaaaaaaaaacctaaaacaaa

SEQ ID NO: 3703 - DNA, 368 bp, Cyanidium caldarium
  Clone ID: LIB190-004-Q1-E1-E8
ggccctgccggtacgagtccgaaattcgcgggtccacccacgcgtccgcagacgcgtgggtagccttggaaacaatgaagaaaggagaaaaggcgattgtgactatttcacctaattatgcctatcagggagttggaatagaggctccaccaggtgtttcaagagatgctacagttcaagtagaattggaactggtttcatttgaaagagcgaaagagtcttggaacttgtccaaggaagagaagattgaaaactcgatgcgcattaaagaaaagggcaatgagttgttcaagtctggtagatataaacttgcgaagaagaagtatgaaaaagtgataagcgatttggagtttgatgtgcgtaacaag

SEQ ID NO: 3704 - DNA, 430 bp, Cyanidium caldarium
  Clone ID: LIB190-004-Q1-E1-F12
taccggaccgagattcgcgggtccacccacgcgtccgcattacctctccaagaaggtgttgcacggctgtcgaaagaacgtgctgtgaagtgagagaacgtacgagaaagccaagtgaggaaaagaaggcaagtagagggcggcccgagaaaggagagggcgtaagacgtgatacagagtaggaagaaaagagaagagagctagaaaggaggtaaaagaagagtaaaaggactagaagaggtacggaattcacgaggaaggagcgtgaaggaaggaggaatcccaagtaatcgaggaagaaaaagcttcggtgaaagcgtgaacggattttgtacacactgcccgtcaagttctggaagtgtgctaggaataagcaggagaagtagaagagagtaggaaaagaagaaaggaagtgaagacgtaagacgtg

SEQ ID NO: 3705 - DNA, 354 bp, Cyanidium caldarium
  Clone ID: LIB190-004-Q1-E1-F3
ggtcgagtcacacgacgggtcaggcatcagcgactgtttagcaaaaacacagcactctgcagaaaagagaaaatgtaaagtatagagtgtgcggcctgccaaatagtagagaagaaatcgatgaaagtgaaagcgagtaaaagatgaggtatagagaatggcggtcctaacggtaaggatccaaaggtagcgaagtaaatagacgtttgaaaggcgtccagtatgaaaggagaaacgagtgtagcactgtctagtcgtccaactcagcgaaacagcaataactgtgaaaatgcagtaaactagcagtaggacggaaagaccccataattcttgactagagaggtttaggggaga

SEQ ID NO: 3706 - DNA, 429 bp, Cyanidium caldarium
  Clone ID: LIB190-004-Q1-E1-F9
cgcctgccggtaccggtccgagattcccgggtccacccacgcgtccgaaaaagcgatcggaagacacagtggatgacgcaataaatcatgcgaagtgacacgggttatgaacccgtgtaggcaacgctgtaatcgaagcaatgagtaagagaatggggagtcattccagcagtggattcaccagggaagtaagagccccagagcaattgacgggactcgtgacagggggtggatcacggggttgattccgttaaaccgacaaccttacctctccactaacgtctcgcacagcggtctacagagctttctgtgaaatgtgatatcgtatgagaaagcctactgaagaaccgaatgcaggtaaaagggcgcctgaaaaacgacacggcgtaagacatgacatagaatatgaagcagagtgaggagagctag

SEQ ID NO: 3707 - DNA, 378 bp, Cyanidium caldarium
  unsure at all n locations
  Clone ID: LIB190-004-Q1-E1-G10
cacacgcgtccgggaagacacagtaaatgaggcgagaaagcataggaagtgaaacggattaggaacccgtgtagtctatgcagtaaaagaaagaatgagtaagaaaaaagggagtcattccaccaggggagtaaaggcgcaagaaagaaacccaaagcaattgacgggaatcggaaaaaggggtggatcacgtaaattaatccgatataaaccgagaaccttacctctccaagaaggtgttgcacggctgtcgaaagaacgtgctgtgaagtgagagaacgtacgagaaagccaagtgaggaaaagaaggcaagtagagggcggcccgagaaaggagagggcgtaagacgtgatacagagtaggaaaaagaangaaaa

SEQ ID NO: 3708 - DNA, 266 bp, Cyanidium caldarium
  Clone ID: LIB190-004-Q1-E1-G4
ggtcgacgcacgcgaccgtatgggtggtagcaaattggaaatatcaagagaggttgtttcattcacacagagtgtagctctaatatggacttgaacccagagatgagttttcgtttttccgcctggttctcgactcctgttggtacgacaacttgagtagctttctctccttttgtcaaagcagtcttcttgttcttcttgcgtcaagtcttttgttcgcgattagcctgcttgatttgttttttaaaaagctacaaactggggta

SEQ ID NO: 3709 - DNA, 369 bp, Cyanidium caldarium
  Clone ID: LIB190-004-Q1-E1-G6
gggtcgacccacgcgaccgcccacgcgtccgcttgcaaggttggcgatcataccttgtgtggaggtccacaaatgttacaactttctctggatggaacgagactgtatgtaaccaattccttgttcagttcttgggataaccagttttatcctgaaatatcggatagaggctcctatttggtaaaggttaattgtaacacggaacaacgtggaatggaactcgaccattccttctttgttgacttttggaaggaacctggtggtccttgtagagcacacgaagttcggtaccctggtggagattgtacttcggatatttggatatgacctagttgtaagatgctatagtgaaggtagttgtttgcttcc

SEQ ID NO: 3710 - DNA, 345 bp, Cyanidium caldarium
  Clone ID: LIB190-004-Q1-E1-G7
ggtccacgcacgcgtccgcactttgcagtactttccaccaaaagtattccttctctatccacttcaaatacttgccaccattgcactgttccttcaggcaaaggtattccacagtcttttgcagccaactaaatacaaccacaagctatacattcaggtgctactcgacaacacaagtcagtacgcaacatatcgtttgcatagttccaagcacgttgcaaaaaggacttccaatgggcgtctccagcgtccactccggagtgactcctcaaagtgttgatatataccaaaataaacttgtgccgatgttctactcctgtatgaaaaaaaatttttcaaaggaaa

SEQ ID NO: 3711 - DNA, 400 bp, Cyanidium caldarium
  Clone ID: LIB190-004-Q1-E1-G9
ggagacccaaattaaggtgagagaatggacgataaggaactaggcaaaaggatatggtatctgcggtagaacatatgaaagaagcagcaccgactgtttagcaaaaacacagcactctgcagaaaagagaaaatgtaaagtatagagtgtgcggcctgccaaatagtagagaagaaatcgatgaaagtgaaagcgagtaaaagatgaggtatagagaatggcggtcctaacagtaaggatccaaaggtagcgaagtaaatagacgtttgaaaggcgtccagtatgaaaggagaaacgagtgtagcactgtctagtcgtccaactcagcgaaacagcaataactgtgaaaatgcagtaaactagcagtaggacggaaagaccccataattcctgactagat

SEQ ID NO: 3712 - DNA, 270 bp, Cyanidium caldarium
  Clone ID: LIB190-004-Q1-E1-H1
ggagaagttttaacgtttgatcagttggcacttcgttcccccaagggtcccaattgcatgcttttgagaggtccgaaacacgctcgcgaagtttataaacactttgctggtgttgctgtggaaggtcacgtgaagccttatgttcgaaacaaggaaaggaagctggaaagagctcgtggacgacgtccaagccgtggtttcaagaggaagccaaagaaggtgtagttgttctatactttctataaatacacaagttttcctagtcaaaaa

SEQ ID NO: 3713 - DNA, 429 bp, Cyanidium caldarium
  Clone ID: LIB190-004-Q1-E1-H10
ttccgggtccacccacgcgtccggaacatgtggagaggcttttcacctgatcattccgaggttggtcacggtggattgattggattgcgccgtgtgcaatggttctatgcaggattggagtatttaggatttattcttgctgttttgtttgttcctgaatattccaatgttggacttcgtggggaggacaagcgttatttggagttgagaactcgttatgctgctcgtctagccaagaaatatggagtggaacctgcccatccggatgaccaagaagcaactcgactaggtcgtttctctgtatggaacctcatttcacgcaagttgacgggtactccggaaagttttgaagaagccaagaaagaatatattcgtatgttgttgtctcgttgttcgttggaaaccaatgaacaagtggaatattatgca

SEQ ID NO: 3714 - DNA, 267 bp, Cyanidium caldarium
  Clone ID: LIB190-004-Q1-E1-H3
ttcccgggtccacccacgcgtccgcagacgcgtccgtgattgtgataccattaagagctcgatgatagattgtttgaccgaacgtactgcgcacctaactggggtttcctgtgactaaatgaatcccgcacatacgtttgctcttcgaattgtttatgataacagtgtaatttcaacgtccgagttggaacatcatgtcggtaattaaggatctaaactggactcctcgacaaattcgagtactccaccaactattcctaatatatc

SEQ ID NO: 3715 - DNA, 339 bp, Cyanidium caldarium
  Clone ID: LIB190-004-Q1-E1-H6
taatattctttgtgcttggacaatggttgcaaagactgctctgagttgcctctttctctctttccttatcgctgccgcagttgcagccgacgtagtttcagaggagagatggggatatgctcagcaaacccaacaacagcaacagtgccaacaagtatgtaaacagtatgcatactatcagagtccagtctgcacttccgtaaccacacagagcccatactggacccaatgctcgaagactgtgcaaacctttgtcccaagccagtgcaagtacttatacccaatctcctacatggacctattgcagcacctacaccaacactagcgtaccacctcaat

SEQ ID NO: 3716 - DNA, 217 bp, Cyanidium caldarium
  Clone ID: LIB190-005-Q1-E1-A12
cccacgcgtccggtggaagaacatgaaagcacagaagagtaaaaggactagaagaggtacggaattcacgaggaaggagcgtgaaggaaggaggaatcccaagtaatcgaggaagaaaaagcttcggtgaaagcgtgaacggattttgtacacactgcccgtcaagttctggaagtgtgctaggaataagcaggagaagtagaagagagtaggaaaa

SEQ ID NO: 3717 - DNA, 416 bp, Cyanidium caldarium
  Clone ID: LIB190-005-Q1-E1-A3
gtccacccacgcgtccgcaaacgcgtccgcccacgcgtccgaaccagacaaacagagctcagttcttccttttatgatatggattctctcaaggtttcttccgagtcaaatctaaagagtgttgtcgatcaaaagagtgtgcaaggatctgccaaggaggtaattagtaatggcagtggaatttcacggaaaactgttccaaaagataatatgcagaatgattattctgcttggcaaactccttcgacaggaaaagatacaattgtaaactcgacatcgaaaggtgtttcatggaagatgaatccgcaaggaatggaatatacttcggcagaaacgactggagttgtctatagtggacgtcaacctaaacctgctgtggataacaactcacaagactattcgagaatggacacttt

SEQ ID NO: 3718 - DNA, 272 bp, Cyanidium caldarium
  Clone ID: LIB190-005-Q1-E1-A6
gggtcgacccacgcatccggaagaaaagagaagagagctagaaaggaggtaaaagaagagtaaaaggactagaagaggtacggaattcacgaggaaggagcgtgaaggaaggaggaatcccaagtaatcgaggaagaaaaagcttcggtgaaagcgtgaacggattttgtacacactgcccgtcaagttctggaagtgtgctaggaataagcaggagaagtagaagagagtaggaaaagaagaaaggaagtgaagacgtaagacgtgaaaaa

SEQ ID NO: 3719 - DNA, 375 bp, Cyanidium caldarium
  unsure at all n locations
  Clone ID: LIB190-005-Q1-E1-A9
cacacgcgtccgcccacgcgtccggaaagaagcagcaccgactgtttagcaaaaacacagcactctgcagaaaagagaaaatgtaaagtatagagtgtgcggcctgccaaatagtagagaagaaatcgatgaaagtgaaagcgagtaaaagatgaggtatagagaatggcggtcctaactgtaaggatccaaaggtagcgaagtaaatagacgtttgaaaggcgtccagtatgaaaggagaaacgagtgtagcactgtctagtcgtccaactcagcgaaacagcaataactgtgaaaatgcagtaaactagcagtaggacggaaagaccccataattcttgactagataggtttaaggangagagagaatcatga

SEQ ID NO: 3720 - DNA, 266 bp, Cyanidium caldarium
  Clone ID: LIB190-005-Q1-E1-B1
catggagaagttcgcaaaagagtatgatgaagacatgtaacatcaggtaagtatatacaggtaagtataggttttggatttggaagaaacaaggtacttcaagtagtcttctttgttgtgtataggatagagcataacttctaaacttatttatttgacttcaattgaattataataaaacattttttgactaaaaaaaaaaaaaaaaaaaaaaaaaaaaaacaaaaaaaaaaaaccaaaagaacaaaaaaaaaacaaaaaacaaa

SEQ ID NO: 3721 - DNA, 308 bp, Cyanidium caldarium
  Clone ID: LIB190-005-Q1-E1-B10
cggggccacccacgcgtccgcacacgcgtccgcggacgcgtgggcggacgcgtggggtgatccaactcgagcgtatcgaaaagaagcaacgagacattggatggtatttcaacaacacgccgaaagagacagagcttgatgaaggcacttacgttgtttgcaacggatttggcataaagagtttcatggaataataataataataataataggagactcctttgactcaataaaatgcgagacaaaattacacaaagggataaccttcgcctagctatttttacgctccttcataaacataccaatgt

SEQ ID NO: 3722 - DNA, 210 bp, Cyanidium caldarium
  Clone ID: LIB190-005-Q1-E1-B11
cccacgcgaccggtacagcataatggaagaaagagaaaggaaaaaactgagtatcaggaagaaaagagggagtagatgaggaaagaaagatcaaggaagtaagagtaagagaaggagtaatgtgaatgaaagcaggaaagtatttgaagaagagagtgtaaagcgcgtaccttttgcataatgtcccagcgagtgaaagaggaagcaaaa

SEQ ID NO: 3723 - DNA, 351 bp, Cyanidium caldarium
  Clone ID: LIB190-005-Q1-E1-B4
gtcgaccgacccgtccggtatctttgagtggagctcctagaagaatacttgtttggttctttgcagacttgagagtggaggacaatgaagctttgatcaaagctgcacagaatggtgctgttcccgggggtctagtattacctctagtggcgctgcataaagaaattccaaggagtgctatcgttgagttgaagacagaactgcaaagacgcggctctgacctgtgcgtcttgcccaagttttgtacggactccatccttgagatatgccataaatacggaatagaagctatctactacaactatgccgagctcccagaccaaatgcagcttcagaatgatatgattactg

SEQ ID NO: 3724 - DNA, 371 bp, Cyanidium caldarium
  Clone ID: LIB190-005-Q1-E1-B5
gggtcgacccacgcatccgatacgacgaaaatgccaaggaaaaaaagtgcaacaaaaaaaaaacgttgatattgcaaaagtttcttttcggatattacagtctctacattttactcagcgagactctacaaggttgacctaaaaaaatattatattctagtttcccaagcataggtatactactcgtcaatgactacgtattcaaatgcttcttccaaatttctgtaaataactagcaagcgtttgctgcaaacgatcggacaagttactttgaataacgtttttcaacgttggattatttgccacaacttcggtaacgttattgatgagcaccttgatagaaagatgagataatacaaagcgctttttca

SEQ ID NO: 3725 - DNA, 472 bp, Cyanidium caldarium
  Clone ID: LIB190-005-Q1-E1-C10
tccgaaattcacgggtccacccacgcgtccgcagacgcgtgggcggacgcgtggggatagactcatttccaaagcaaggtcaaaaatgggtggtgcttatatgattttggaatttgcagcctttatatactgggcgccttggatttactgtattccgttatcgactgcgcagcatcaaaagagaagattgttgccacggtggaattaaaaaatagaaaaatgcgactctagaaatttggcgcctctaatgaatcctaaataaatgggattgtttagctttggagaaaagctgtttttcgtttttttgtgcacgaagagagatgagtcgctctatggagatatcaatcaaagcatcggagtcggagagcacattacaaagtacacgaaatgaagaattcaaccatggcaacaatttttacgaagaaattgaaaaactaacttctctggggtacaacgcatcagatatacaaaa

SEQ ID NO: 3726 - DNA, 474 bp, Cyanidium caldarium
  Clone ID: LIB190-005-Q1-E1-C11
gtagccgtccgaaattccaaggtccacccacgcgtccgaacaacagtgccaacaagtatgtaaacagtatgcatactatcagagtccagtctgcacttccgtaaccacacagagcccatactggacccaatgctcgaagactgtgcaaacctttgtcccaagccagtgcagtacttatacccaatctcctacatggacctattgcagcacctacaccaccactagcgtaccatctcaatgcagcaaggccgtgactacctatactcaaacctgctgtgcttatgcccaacaaacttcctatgcagtcagtaccgagcaatatgttcaggaaactgtatctgctcaatatacttcttactacggcgaatcatcctccagctattattaccgagcagctgctcctcagagatggtatgaggaacaatgcacctcatactgctgggttccagtacaggactatgaaacttaacaatg

SEQ ID NO: 3727 - DNA, 395 bp, Cyanidium caldarium
  Clone ID: LIB190-005-Q1-E1-C12
ggtccacccacgcgtccgaaagatattttttgtggtgaattgggaagcgagggaatggaatgacgagagatgaaacaatgattaggcgccaatcctcttcatgtctgcatgcttgttgttttcacacttgttggctatcaaagccgcgaatagatagtttcaaatacaaaacatcgtccaagtgttttccttcttcctccgagcgctgcgctttgcaccgtttcaagactcgggtcagtagaaggaatgcgcaggtcgtgcgttgtatgtttactaccgaccatactcagccactgtacttggcacaatcccttgtggcttttacgccttctgcatccttaatacagtttactagtggtctgggtggtttggcagtacttgccttggttatcata

SEQ ID NO: 3728 - DNA, 279 bp, Cyanidium caldarium
  unsure at all n locations
  Clone ID: LIB190-005-Q1-E1-C4
cgcctgcggtancggtccgacattcacggggccacccacgcgtccgcagacgcgtgggtttttgctaacacgttggttgagttgtagaaagcatttgataaatttcccgcgaggaatcctacttgggacgtgtcctccaatgctgcagagagctattcggtatgtctgtttattgcttgttttcataagagagagagagttggacatcgaataaagaaaaaaccacacaaagtggaacaacgtaaaaaaaaaacaaccagaaaaaacagaaaccacaca

SEQ ID NO: 3729 - DNA, 308 bp, Cyanidium caldarium
  Clone ID: LIB190-005-Q1-E1-D11
tccgaaattcaagggtccacccacgcgtccgcaaacgcgtccgcccacgcgtccgctgagataacaaagtggcaggatcgactggcttgtgcgtttctccatccacaaagcatagtttgccagttgtattgttttgatggtttctgttgattattcccttttttttcacaaactttgtccagtacttgtccaatagtcatatatttgggataatacaacgataaaggttgttgtagtgatctcgtagtggctaagttagcagcaacatggtcatctatggtgacatacaaataaactctatcttgcat

SEQ ID NO: 3730 - DNA, 350 bp, Cyanidium caldarium
  Clone ID: LIB190-005-Q1-E1-D2
ttcacgggtccacccacgcgtccgcaatcttttcgagattggagtcccgcagagtcactcgatactgttactcctgctgtatctagaccgattgctgttcatggaccaaaatattcacctcaaacgacgacaagagaagctgggtcggatatccgagcggaaggtgaactttggcaacggaaaggacatttggtgaagttttggcgacgacgatttgctgctatactaccacattctgtttttggaaatgtattgtgtattttcgagatggaaaagaaccagactttgcagcctaccaagtcaaaaatgcttgctttgaaaaatactcaagtgaagagcgaaccgaatac

SEQ ID NO: 3731 - DNA, 406 bp, Cyanidium caldarium
  Clone ID: LIB190-005-Q1-E1-D4
cacgcgtccgaaactttctgcgggtgattctggtgagaagttgaactccgtttttgccaaaattgaaggactggagtcttggtctgtcgaggccaaggtattgatgatgaatattatgaaaaggtggattgactcaagggagaatgaatgggcgacactcgatgccttgcaaaactctcgagccagaatttcagagttggaagccgaagtgaaacaactttgtcatcaaattaagctgttggagttggaaaatgatcgtcgactaactgaacaatccttgaaacatatgaatcagagttttgtaaatgaagaaaatgttagtgacgtttgtatgacgacaagtgattcatccaacgttgttcaagacgacgacgaacatccagatacgatcatccctgcaactcga

SEQ ID NO: 3732 - DNA, 346 bp, Cyanidium caldarium
  Clone ID: LIB190-005-Q1-E1-D5
ccacgcgtccgcagacgcgtgggcggacgcgtgggcggacgcgtgggttgagatcactaaagacggtgtgggcagaacacttgagcgatgagtgtaaacgccgcttttacaaaaattggtacaagagcaagaagaaggctttcacgaaatacgcaaaggtcaagtatcaaaaaggtggagaaagcatcaaaagagacttggagaagattaagaaatactgtaccgttattcgtgttcttgcgcatactcaaatgagaaaattgaacattggacaaaagaaagcccacatcgcagaaatacaagtgaacggtggaacgaccgcagaaaaggtcgactttgctacggg

SEQ ID NO: 3733 - DNA, 415 bp, Cyanidium caldarium
  Clone ID: LIB190-005-Q1-E1-D6
gggtcgacccacgcatccgcccacgcgtccgcccacgcgtccgcccacgcgtccgggcaactcaactaggttcttttaagaatgagattgttccagtgacactgagtgatggcaccgtttttgatgccgatgaagaagtacagagattcaaacaagtggatcgtttaggagaattgaagacggtatttaagaaacaaaatggaacagtaactgctggaaactcgagcaagttgagcgatggagctgctgcattagtgttggcaagtggccaagcagttcgagaatatggtttgaagccacttgcgaagattataagttatgcagatggagaacaagctcctattcgatttccaacaactcctgcaaaggcagtcaagttagcactagaaagagccaaacttgccgtcaaagatgt

SEQ ID NO: 3734 - DNA, 79 bp, Cyanidium caldarium
  Clone ID: LIB190-005-Q1-E1-D7
ttcccgggtccacccacgcgtccgaattgtcttctggtcactataaagagttgagtatttcatgttcaagtccctattc

SEQ ID NO: 3735 - DNA, 278 bp, Cyanidium caldarium
  Clone ID: LIB190-005-Q1-E1-E3
tagccgtccgaaattcacgggtccacccacgcgtccgccaacgcgtccgcccacgcgtccgagccaatttggtgcagatcactttggtgcagtattgccagtgtcagtagaagaaacataacaagtccaagctctttggactctattttgatttctatctagactggcaatgtaaatagaactgagagtgtcaagttacccctttttgtcggtagagagtgacaatgggggttgcgttaccaagacggcaagtctacgcagtcgtcgacacaagaaaa

SEQ ID NO: 3736 - DNA, 370 bp, Cyanidium caldarium
  Clone ID: LIB190-005-Q1-E1-E4
tagcggtccgtaattcacgggtccacccacgcgtccgcacacgcgtccgcccacgcgtccgcccacgcgtccgcccacgcgtccggtatattactttggaaagcgacctgaagattggaagtattgcagacttgttggaatggtattcatagttgccggtgaatgtattcgaaagttgggaacccaacttttgttggtcaatcctatttcttgtatcctctttgctgttcttagttggaagttttttcgcgatcgaatccgatgggaagaagagacactcgttggcctttatggtgttcagtttcaggaaaagtatcgaaacaaagtttggagtggaattccttttatttaaatacgacctgccgattgg

SEQ ID NO: 3737 - DNA, 449 bp, Cyanidium caldarium
  unsure at all n locations
  Clone ID: LIB190-005-Q1-E1-E8
tccgaaattcncgggtccacccacgcgtccgcaggtactcgaggagaaaggagacccaaattaaggtgagagaatggacgataaggaactaggcaaaaggatatggtatctgcggtagaacatatgaaagaagcagcaccgactgtttagcaaaaacacagcactctgcagaaaagagaaaatgtaaagtatagagtgtgcggcctgccaaatagtagagaagaaatcgatgaaagtgaaagcgagtaaaagatgaggtatagagaatggcggtcctaacagtaaggatccaaaggtagcgaagtaaatagacgtttgaaaggcgtccagtatgaaaggagaaacgagtgtagcactgtctagtcgtccaactcagcgaaacagcaataactgtgaaaatgcagtaaactagcagtaggacgggaaagacccataattcttgactagat

SEQ ID NO: 3738 - DNA, 452 bp, Cyanidium caldarium
  Clone ID: LIB190-005-Q1-E1-E9
gcatccagtatgaaaggagaaacgagtgtagcactgtctagtcgtccaactcagcgaaacaataactgtgaaaatgcagtaaactagcagtaggacggaaagaccccataattcttgactagataggtttagggaggagagagaatcatgaagtagaggaggtggggtaagagatgaaagaccactgcatgaggataaggaatctaactgagtaaggaaaataagcttaagctagtttggctggggaagtaaagcctaagaaagagtaaattaggcaagcaaaggcatgagagaagtataatagcagaagcatgcttgaagaaaaagaaagagatttcagaaagggaagaaaagtcagctatagagaacaggtgaaggagaactcaaaaagaggagagcaccgaacgatcgaagaagaaactttgggggtaacacgttaaagtggggttaaa

SEQ ID NO: 3739 - DNA, 480 bp, Cyanidium caldarium
  Clone ID: LIB190-005-Q1-E1-F12
tagccgtccgagattccagggtccacccacgcgtccgcactctgggaaggttgttgttgaacgtgaaactggtcgttcccgtggttttggtttcgtatcctatgcagaaggttcctccgtagacgaatgcattgccgcactggatggcaaggatatgcaaggacgcactattcgtgtgaacaaggcaatgtctcgtgaacaacgcgagagtggaggagactttcgtcgcggtggtcgtggacgatacggaggttttcgttccggtccttatgagagacgtgaacgtgactctgatcgtagaagagatcatgacaggagagataacggccatagtagccgaggtcgcagtggaggtttccgccgtcgtgaagactttgattgagagtatttgtgaagtcttttattgttggttgcctatactagaaactagctatacgcatttgtttccagtaaagttttggataaattgctcattcaaaa

SEQ ID NO: 3740 - DNA, 360 bp, Cyanidium caldarium
  Clone ID: LIB190-005-Q1-E1-F2
ggtcgcacccacgcgtccgaattgttgtggctatgtacggttacggttgtcgttgcgtgtgaacgcgaacaacaagtggagcgacttgtgaaaagaaaccatttgtctcgagaagaagccttgcaacgaatcgattcccaaatgcctttacaagaaaaagtacgtttggcaaatttcgtggtggacaactccggaaacttggcggtattagagaaacaagtgaatgaactttggcaacaattagagcacattcgtattcgaagattgcgtcgattcaagttgtttggatgggctgggttaggtgcccttgtggttattatttccatgggactgttcaggaaataggagaaaaagaaaata

SEQ ID NO: 3741 - DNA, 423 bp, Cyanidium caldarium
  Clone ID: LIB190-005-Q1-E1-F3
ccacgcgtccggaggtttctcgtagctttattgaatcgaaacaaaaagctcgtttacatagtgaagctaatagaaactgtcataaagtggctgtaactggaagctggagaagagaagagattccatcgaaccacagtgtgttcgatacagcttacgaaagtatagtcagtaatctacgagatgaagctagcgccgaccaaagtgaagaattcaagaggcttttaaagtccatagagacatttgaagaaggagaagtagtttcctcagtcttgccaaccgatgagaaacagtttatttgccccctttcacaaaagctactagttgaacctgtgaaaaataaggagtgtcttcatacgtattcgaaagaagcattagtgacatatttgaaaaacgacaaaaactcaaaaaacaaactcgcaagct

SEQ ID NO: 3742 - DNA, 351 bp, Cyanidium caldarium
  Clone ID: LIB190-005-Q1-E1-F5
ggtccacccacgcatccgcagacgcgtgggcggacgcgtgggcggacgcgtgggcgactagactcgtggattggaaggagtagcagtgaatattccaaaggtggcaactcttctccagaagggggttcatctcctaaattgggtagcagtccttcgaaactaagcaaaagtcctcgcgctcaagaagtttggagtaaaacagtgcatccttgggggcgttcttactcaggaaaaaaacgttatgacaccgtggagaaggacacagagaaggaaccaagtatatttgagatacatgatctgtccaagaaacagagcggcagccagtaagaagagagtttgtgagttttcaat

SEQ ID NO: 3743 - DNA, 420 bp, Cyanidium caldarium
  Clone ID: LIB190-005-Q1-E1-F6
gggtcgacccacgcatccggcataaaattgccgaaagtatcccagtggaagaaggtggtgaggaggtcgagtcggtacgtgaggaagaaaccaacgtggaaaataatgaacaagatacaacgaagcaagaagaagaagaaattgtttccaagtttgttcgttccaaggcagtacctggttcttcgaaagcatcgagtaagggtagcaagatgggcgaaaagggaggtaaaaagagtaggaaaactgctacaaagaaatgaagtactcgatcttccatgcactcttgccaatgtcatttgttgcattcattggaacacttcatttggcaagtcataaaacgcattttttcactccaatttggattgactcctccccgtccttccatggaaccaaataaatttgttgcgattattgtcgttc

SEQ ID NO: 3744 - DNA, 384 bp, Cyanidium caldarium
  Clone ID: LIB190-005-Q1-E1-G10
gccacccacgcgtccgcacacgcgaccgggagcagtgattgttgccatggttttgtttgacatgatttcgaagctgatagaaaaagctcgagcaccaacagagcaagaagtggagcaggaagcaaaagacaggatctatcgacgctatgaacaaagtgagctggtgcgatatatgtggagttctcctgtgaaaccaccaaactggtggaagtcggatgcctttcaagaaaattataagcaattgtgtcacagacataagcagcgcctcaagacccctgcagagcgaacgctagaagatatggaagaaatgtaaagacctagtagcctttggtaccgcaagggagtagtaacaatggtgttgcaaccagttggagtttccttgtt

SEQ ID NO: 3745 - DNA, 430 bp, Cyanidium caldarium
  Clone ID: LIB190-005-Q1-E1-G12
tatgcacaggatagacaatttcatttggaatgtattgtcatccatttttaggcttgagagtttttcgtctttgttatgttttttggttttgtatatgtttcctgtattttccaccttgtttacttttctacttcctcgtccattatctgtgaacagcttatggttcttattattgatgatccatttttggagttggcagcatgcagataatcgatggaaaagagtgttttcgcggtatcttataccgcttcactttctagttttcggattttcacatttgactgtgatagattaactaacctcaatggaaaggattctcttggctttcttgttgtgtatcgttcgcagcggagatatactgacaagagaagttctccttgtgttgtgtatacaatatatattcttagagtggatacagagtcagcctctg

SEQ ID NO: 3746 - DNA, 356 bp, Cyanidium caldarium
  Clone ID: LIB190-005-Q1-E1-G5
cgggtcccaccacgcgtccgcattgattgctcgacgaggcgcagaatgttcttgtcgtttaaacttgttgactgttgataaccctgtataagagcagttcaagttgtgcatcttttgataagaccatagtgaatataacggataatattcttttgctcaagaaaagcaacttggaggagttgcggataagagtgtatggaggacgcaaggcaaaaccttgtgtttaacaacttgtatatggaatacgactagggagaaaggagggagttatcttcccacaaaacactagaggcttctgttacgttacggaggcaagaaggacgaaggcgttccaaagtgttggaaccccatttgtg

SEQ ID NO: 3747 - DNA, 466 bp, Cyanidium caldarium
  Clone ID: LIB190-005-Q1-E1-G6
gggtccacccacgcgtccgcacacgcgtccgccctcgtccctcgtcgtctcctccaacgagtaccaaaacataaaatagaaaatggcaactttactatccaaaaaaagaagagcagtagccgacggtgttttcaaagcagaacttaacgagtttctgatgcgagaattgtcggaagagggatactctggtgtagaagtgaaacccacgccgttgcgaacggaaatcgtgatccgagctaccagaacacaaaacgtgttgggagaaaaaggtcgaaggattagagaactcactgcgttggtacagaagcgattccgttttcctgaaggaacagtggaactttatgcggaaaaggttgcggatagaggtttatgtgccattgcgcaagcacaaagtttgcggtacaagttgttgggtggattggctgtgcgtagagcttgttagggcgtcctacgatttgtgatggaa

SEQ ID NO: 3748 - DNA, 226 bp, Cyanidium caldarium
  Clone ID: LIB190-005-Q1-E1-G7
ccttgtagtggccacaggactggagatttatgttgctattcagacattgctagatactttgaaatacaagtctagcaagtttcctatcggtagcatatgttgatgaatagcatcgtttggtattcttggttggttggtaaatttcttctgggtggactgttgcaatatgtatatggaaataaaaatattgtcaaaataaatacttttgtctttggagttgagatac

SEQ ID NO: 3749 - DNA, 311 bp, Cyanidium caldarium
  Clone ID: LIB190-005-Q1-E1-H4
gcgtccgcacacgcgtccgcccacgcgtccgctggaattatgttgtcggaaacttttgtgaagctgattgcttggtatgataatgagtggggctactccaatcgtgttgtagatttggtgcaccatatggcgaaagttgatggtgtagcttaactctgcttttcttgttgttttttcgtgtattgtttgttttgtgaaagagatgaaatgtgttgtcttttccataaaaagttgtgtgcgctgtgaaaaaaaaaaaaaaaaaaaaaaaaagacaaaaaaaaaaaaaaaaaaaaaacaaacaacagacaggg

SEQ ID NO: 3750 - DNA, 440 bp, Cyanidium caldarium
  Clone ID: LIB190-005-Q1-E1-H5
ggggccacccacgcgtccgaaaggaagtaaaaggagggaatgaagggaagttatggcaaaaacacgtgccagcagcagcggtaaaacgtgtgtagcaagcgtagagcagaagaactgggtgtaaaggtcgagtagtagagtaagtgtaaaagggaaaggaaaggagagaaagaggaaagggatgaaatgcagagatctctagagaaaggcaagaaagaaaagaaaggaagacacagtaaatgaggcgagaaagcataggaagtgaaacggattaggaacccgtgtagtctatgcagtaaaagaaagaatgagtaagaaaaaagggagtcattccaccaggggagtaaaggcgcaagaaagaaaccaaagcaattgacgggaatcggaaaaacgggtggatcacgtaaattaatccgatataaaccgagaaccttacctct

SEQ ID NO: 3751 - DNA, 360 bp, Cyanidium caldarium
  Clone ID: LIB190-005-Q1-E1-H6
ccgggtccacccacgcgtccggacaagcgtcgtgacagaagcaccaccgactgtttaccacaaacgcagcactctgcacattagacaaaatgtaaagtggacaatgtgcggcctgccaaatcgtcaagaccagctccatcacagtgaaagctagtaaaagatcaggtatatagaatggcggtcacaactgtcaggatccagaggtagccacctacacagacgtctgataggcgtccagtacgaaatgagagactactgtagcatagtctagtcatgtatctaatcgagacaccagtacactgtgaaaacgcaatgaactggcactaggacggaatgaccccacacatcttgactataaaa

SEQ ID NO: 3752 - DNA, 362 bp, Cyanidium caldarium
  Clone ID: LIB190-006-Q1-E1-A10
gtatgacatgatttcgaagctgaaagaaaaagctcgagcaccagcatagcatgaactggagcaggaatcaaaagacaggatctatcgacgctatgaccaaagtgagctggtgcaatatatgtggagttctcctgtgaaaccaccaacctggtggaagtcggatgcctttcatgaaaattataagcatttgtgtcacagacatagagcagcgcctcaagacccactgcatagcgaactctctaagatatggcagaaatgtaaagactttacagcctttggtatcgcacgggagtactaacaatggtgttgcaaccagttggagtttccttgatctatgagcacttattataaacaatttattg

SEQ ID NO: 3753 - DNA, 408 bp, Cyanidium caldarium
  Clone ID: LIB190-006-Q1-E1-A2
ccggtccgagattcacgggtcgcccgacgcgtccgccaacgcatccgggagacccaaattaaggtgagagaatggacgataaggaactaggcaaaaggatatggtatctgcggtagaacatatgaaagaagcagcaccgactgtttagcaaaaacacagcactctgcagaaaagagaaaatgtaaagtatagagtgtgcggcctgccaaatagtagagaagaaatcgatgaaagtgaaagcgagtaaaagatgaggtatagagaatggcggtcctaacggtaaggatccaaaggtagcgaagtaaatagacgtttgaaaggcgtccagtatgaaaggagaaacgagtgtaacactgtctagtcgtcaaactcagcgaaacagcaataactgtgaaaatgcagtaaact

SEQ ID NO: 3754 - DNA, 403 bp, Cyanidium caldarium
  unsure at all n locations
  Clone ID: LIB190-006-Q1-E1-A4
gggtcgacgcacgcgtccggattgaaaggcgtccagtatgaaaggagaaaggagacccaaattaaggtgagagaatggacgataaggaactaggcaaaaggatatggtatctgcggtagaacatatgaaagaagcagcaccgactgtttagcaaaaacacagcactctgcagaaaagagaaaatgtaaagtatagagtgtgcggcctgccaaatagtagagaagaaatcgatgaaagtgaaagcgagtaaaagatgaggtatagagaatggcggtcctaacagtaaggatccaaaggtagcgaagtaaatagacgtttgaaaggcgtccagtatgaaaggagaaacgagtgtagcactgtctagtcgtcnaactcagcgaaacagcaataactgtgaaaatgc

SEQ ID NO: 3755 - DNA, 438 bp, Cyanidium caldarium
  Clone ID: LIB190-006-Q1-E1-A5
ttcgcggggccacccacgcgtccggagaggaacaatatctgcttggccagtctcaaagaaccttcaataagtatccaaattataagaaacttataacgagtagcaacataacactgtgtattctcctgtgctttttcctagtagtatttcgtaacactgcgggctttgtctcacctgtctatagaaaaaactctggtacaagtgctgccttgcttctcgactctccatcttttcaaaatggcacccgtatacctaagaaatacggctgtgattattgtgaacaagccgcaagctctgtgccgctgacttggagggtaagcctctagggacaatacgcttagtgacagtttcagttgcaaggagtgagttgcagagctgacaatacctttgtgttattagtgcacgatccagatgctattagtgttactggattggatt

SEQ ID NO: 3756 - DNA, 357 bp, Cyanidium caldarium
  unsure at all n locations
  Clone ID: LIB190-006-Q1-E1-A6
taccggtccgtgattcccggggccacccacgcgtccgcatttgggcaaccgtcaagtggagcaacgactggttggttgttggtgaaggagcacaagtgttgcattgttgttcaatactgtttgtaatagtagcagtgagagtatcatgacgagtagtaacagtggtagtgctcatcaacaagccaaggattgggtggagtccattagcaaaaatgagtggacaaagcctgcagctgctgtggcaggaactttggcctccttgggactgataagaatgtattctaatggacctgtatataaaaattccgtcaacttgaagggcanagtagttgtagtgacaggtgccaatacaggcat

SEQ ID NO: 3757 - DNA, 425 bp, Cyanidium caldarium
  Clone ID: LIB190-006-Q1-E1-A7
ggggccacccacgcgtccggaaagaaaagagaatatccaatatagtatttatgggaatgggagaacctcttcataatatcgacaacgtcctaagggctattgagatacttttggatgaacaaggccttcatctatcccataacaaagtaacagtttcaacttcaggtttggtacctgaaatggagcgacttgcaaaagaaaccaatgtcaacatcgcactgtcattgaatgcgacaaccgatcaagttcgcgaccagttgatgccgatcaaccgcaaatatcccatccaagttctcttaaatacagcgagacgaatttacaccaacgaacgaagcggtcaaaaacttttcgtcgaatatgtcatgttggacggtgtgaatgatagtatcgaggatgccaaacgactgcatatgttattggctggg

SEQ ID NO: 3758 - DNA, 496 bp, Cyanidium caldarium
  unsure at all n locations
  Clone ID: LIB190-006-Q1-E1-A8
taccggtccgagattcccggggccacccacgcgtccgaactattccattgtgaatatgttggaccttttcagttattgcaagattccgccagcagtgaatcagattgaaatgcatccgtattatgcaagaacagatctgctcgaattttgtaagagtcgtggagttcatgtgactgcttattctcctcttgggagcggtaaacatggtccgcttcaagatgagacagttgcaaagattgccaagaaacatggaaggacacctgctcaggtattgatccgatggtgtctacaacgtgggtgttccgttattccaaagagcgtaaagaaagaacgtatcaaggaaaactttgatgttttattcgaattgagtccacaggatatgaaggaattgnngagccttagatagaacataatcctcaatcatcaaaaggaatattggggttccaatatccagccttgaaagattctttgccgtacaataaacaaatttcttgtt

SEQ ID NO: 3759 - DNA, 468 bp, Cyanidium caldarium
  unsure at all n locations
  Clone ID: LIB190-006-Q1-E1-B2
cggtccgtaattcacgggtgcccgcacgcgtccgcacacgcatccgcccacgcgtccggcagcatgatgaagagcgctatgaagttctttgtatttagcattattttggcaaatgttgttcttactattcaagcagcaacggttttggagactttggagtcactgaaatatacagagtatcttgacatggtaaaggctgcaggcctggactcgaagttcaacgactctgctgttacatggactgtttttgcagcaaacaatactggagtcaatgccaccttggcaccaaagcacttggttatttctaatatcacatctaatgcgacggagagcaaagacattgtggaatatacttttgtacaacatactcttttgtcagatgatattaagacaggaacaactatccttaccgccgtanacggaatgaatttgactgtggttaagaatacgacacgaatatttgtaaat

SEQ ID NO: 3760 - DNA, 450 bp, Cyanidium caldarium
  Clone ID: LIB190-006-Q1-E1-B3
ttcacgggtcgcccgacgcgtccgagacaaaaattttatggaaaagtttcaaaaactggagaagatcggtgaaggcacttatggagttgtatacaaagcaaaagacaaatatacaggagaactcgttgcactgaagaagataaggctggaacacgaggaagaaggagtaccttctacagcaattcgcgaaatttccatattgaaggaattgcaacatccaaacattgtgaggtaagcatggagtgatgagagttctttgagtatattcgttgttcagacttcgagatgtgatccacctggactccaaactatatctggtgttcgagtatctggaacaagatttgaaacattttatggatagtttaccccctggaaagctagaccctcttctaatcaaatcttatttgtatcagcttctgaatggtttggcgtattgtcacgcaaaccgta

SEQ ID NO: 3761 - DNA, 354 bp, Cyanidium caldarium
  unsure at all n locations
  Clone ID: LIB190-006-Q1-E1-B4
ggtcgaccgacccgtccgcggacgcatgggcggacgcgtggggcgttggatcccaatatactcgtaccagcgtggtatcgagacaatgtgcaaaatactttgccgttgttatcccttttgttcgaggtatagtgagatagttgttgggaaatggtgcaacgagttgaagactggaacatatatatatagcgtttggaacaagaacatgtggtagatattacggaagaggatttcgatagccatatagatgatagcattcaggtangtgtatggatagagttacttgggatatactttgtttttaaagatagcgatagcacaagatacaagaactagaaaaatggaaacaaaaat

SEQ ID NO: 3762 - DNA, 253 bp, Cyanidium caldarium
  Clone ID: LIB190-006-Q1-E1-B6
gaaataaagcacgaaacaggttttatttcgtcgcactgaagaactcacaaactcagtgtagagaatccaatttgtttccatcacacgaaaatttcagactctccaaactctgcattgggatcgaagccaccaaaggcaggctgctcattaaaagaaggccatgatggataggatggatattgaggaaattccacataggatgtgtaagaaggagcgtaaaaatagctaggcgaaggatatccctttgagtaat

SEQ ID NO: 3763 - DNA, 448 bp, Cyanidium caldarium
  Clone ID: LIB190-006-Q1-E1-B7
gtaccgatccgagattcccggggccacccacgcgtccgccaacgcgtccggtgaggtggaaaaattctttgtgttggtaaatggaccctcgttattatcctgtcaatactgttccagaaccaagtgctcctactgaaagttcctcggaaacttttagcaacacttatcatcccattcataaccaacaaaacctacagtataacaggagaccacctcctttgaacactaatttcttggatacaaaatccagtaatctgcatcaaaacgtcgctgtacatagccctactccaggcttcaacgactactacacaagtcaacacagcaacgaggagaatgagagaaccaaagaattggttcgatggaaggacgagttgttctctggtctatttgtaggcttaacgtttctttgtacttgtatacttgtgtggagtgcttggtggacagctac

SEQ ID NO: 3764 - DNA, 454 bp, Cyanidium caldarium
  unsure at all n locations
  Clone ID: LIB190-006-Q1-E1-B8
taccgatccgtaaattccgggtccacccacgcgtccgaactgctattgggttggttatctcgtttttccagttttgctacggtctgttgggtatctttttcaagtggcaacaaaagttgtggtatattgaagatgctttcaatctatttttctgggcttggtggttggttggtgctatcgttgctaccgctgcaagaccatcgactggaatgctcaacttgcacaacaacaggacagaagtgaatgccgtggaggctttgttgtggggaaatatgtgtctctatttcttcaatatattcttggtgttctttatctattgggttggtgaaactggttggttggatcctactgttgcagactatcgcgtattgacttcattnggaaaaggacaactgggaaaggaagctcagttgcatcaggatantccctaagaagaagcaatgttggttggttg

SEQ ID NO: 3765 - DNA, 469 bp, Cyanidium caldarium
  unsure at all n locations
  Clone ID: LIB190-006-Q1-E1-B9
cctgcccgtacaggtccgaaattcncggggccacccacgcgtccgaattggctaagcaagcagagaaaaagttacaacttgccaatttgttgggaaacaaacctcccaaagtcagagaaaccagtacagtagcagttgatgatttgaagccttggaagagagaagacgacgatgatccaactttatcagaaataggtcaaaagaatttgcagcagcagcaacagaatgctgtaaataatatgaataatagaaaggataacaagaacaagacagtagatatgaccaaagagttttttagggagcctccaagacgtggaagaggaggaaatagtcgcggtattggagggaataggagaggaggaagaggaaaaaccggtcctccaaatacttccaataataactatcgacgtgaagaaggaatagtggaagaagcaagaaatgatcatagacgagctgcttctcgatcgag

SEQ ID NO: 3766 - DNA, 483 bp, Cyanidium caldarium
  Clone ID: LIB190-006-Q1-E1-C11
cctgccggtacaggtccgaaattcccgggtccacccacgcgtccgcagacgcgtgggaaaagaattggatataataacatgatatactccgaagatgaagtagaacgtattggccgtgttgcttttcaagtggcacgtcagcgtaaaggtcgactatgttctgtggacaagtctaatgtgttagatgtcagccaattatggcgagaagtaatcgtttccttgtcaaaagaatatcctgatgtggaactgactcatatgtacgtggataatgcggcaatgcaattgattcgcaatcctcgtcagtttgatactattgttactggaaatctgtttggagatatattatctgatgaagcttctatgttggttggttctttaggaatgttaccatctgcttctttaggagaaggcaatcgtccaggagtatttgaacctgttcatggttcagctcctgatattgctggtcaggacaaagccaatcca

SEQ ID NO: 3767 - DNA, 321 bp, Cyanidium caldarium
  Clone ID: LIB190-006-Q1-E1-C2
ttcacgggtgcccccacgcgtccgaaattttcggcaaattgtcagtacatgccaactacttgtgtcctataggttcggtggggctagttatgataatagctttgctactttttgtgtttctaaggagcttttttgggttctgagaaacgttgctgttgcttgaattcgcctctggtcttaagaattaactgtatcgtcagactacttattgacactggcagtaatttgactagtcctgcgttgggtatgatctcgttatctttagcaagtcctttatctacagtgttgaatattttgcaaaataaaacttccgtttcttcg

SEQ ID NO: 3768 - DNA, 442 bp, Cyanidium caldarium
  Clone ID: LIB190-006-Q1-E1-C3
ccggtccgtagttcacgggtcgcccgacgcgtccgccagtcgtggtggtggtggtcatttttcccatccaaaaaaagatgatggacagcaagttattggccatcgtacaactttgtgctaccaacgatatcgaagccaactttagaaattgtgcaagtcttattcatcaagctgttgttcaaggtgctcgtttcgtgagtcttcccgagtgtttcgagtatataggcgccacacccaaagatgcgctttccatagctcaacctttggacggccctttattttctcgctatagagaattggctgtgaaagaacaagtttggctgtcattagcaggtttccacgaacgagggccggatgacgctcacatctataattcgcaggtcgtagtggatcctagagggtccatagttgctgtttatcgcaagttgcacttgtttgatgt

SEQ ID NO: 3769 - DNA, 464 bp, Cyanidium caldarium
  unsure at all n locations
  Clone ID: LIB190-006-Q1-E1-C6
ttcgcggggccacccacgcgtccgaaaactgcaagtcctataaggcgcacaatgcaggaactggaccagcaaaaagttgatacagattcaactagtcttgccgaagtacaactatttccagccatagaagaaaccaaatttccaaaggctattcgaccaaaaggaaatgagacttcaccacaaagcgaagcatatgctgtacaactatttcgaagtatgagaaaagctttactaacttcaccattatatgcgaatgatatttccaggaaagtgtctaagcgacagatatatacttacagtgacttgatactcaacaatactgaaaacgcaaaacctcgcctgtttgaggaatcaacttggttgaaaaccaaagtacttcaaacttccttcntcctagtcaacggaataataatacaactagagaaaggtcaaagaaaagaaaaactttgtcttcaaccaatata

SEQ ID NO: 3770 - DNA, 338 bp, Cyanidium caldarium
  Clone ID: LIB190-006-Q1-E1-C8
ggggccacccacgcgtccggaccgccctttttttttttttttcctactctcttctacttctcctgcttattcctagcacacttccagaacttgacgggcagtgtgtacaaaatccgttcacgctttcaccgaagctttttcttcctcgattacttgggattcctccttccttcacgctccttcctcgtgcttctcttgtttggaccttttctcagttccaatgtggctttcctcctctcagattcccgcttttacttcctttatggtttttactctaaccatttcttacattcttctgtgctttcatgttcttccactctttcacacctctttacgac

SEQ ID NO: 3771 - DNA, 463 bp, Cyanidium caldarium
  Clone ID: LIB190-006-Q1-E1-C9
cctgccggtacaggtccgaaattcccgggtccacccacgcgtccgcaggctttagaagagtctcgctttgccgatgctgcgaatgaaaagcaacgtttggaagaaaaacaaagagctgctagaaagatgagagaagagcgaggggaagaatattctccattatggtttgactggaaatatgaccaagtcaccgaaaagtacgattggaagttaatggcaaatattatattcatcgcaaagaaaagaaatgggacatatgtccggatttgttctgaagagctgcggattagaattgagcaattctgtcgagcaagtccctcgaaagatagcaactcgtgtcgtatgcgtttttcatttccgttgcttttgtggtttgtctgtataaagcgtttgcattgttcccatcaaaaaaaaaaaaaaaaaaaaaaaaaaaaaaaaaaaaaaaaaaaaaaaaaaagggcgg

SEQ ID NO: 3772 - DNA, 484 bp, Cyanidium caldarium
  Clone ID: LIB190-006-Q1-E1-D10
gcctgccggtacaggtccgaaattcccgggtccacccacgcgtccgtgattgttgttgttggtgaggtgggaagcaagaagagatgagtagaggaagtagtgccggttatgatcgacatattactattttctctccagagggacgactatatcaagtagaatatgcctttaaggctgtaaagtcagtaggaattaccaccgttgctgtaaaggggctggatgcagtttgtggagtaactcaaaagaaggtaaccagcgacactctagttgtgttggtgatcgtctatatgcagatatattgacacatatatgtattgtctttgtatatataggttccagataagctcattgaccctaaatcagtcactaatgttttccgaatatcggatcaccacggctgtattttcactggacttgcaagtgggtgttactctgtttgtggtggcgaaacctaattttctttctatagcggacgcaagggcac

SEQ ID NO: 3773 - DNA, 434 bp, Cyanidium caldarium
  Clone ID: LIB190-006-Q1-E1-D11
gggtccacccacgcgtccgcatgggtagtcccagttggagatatagagataggttttgtatttctagcggctgttactggattcctattgtttttggtggtcttcattgaccaaaatgtttgtacttatattgtagaaagaccagaaaacaaactgcgcaagggtacttcatatagttggaatatggtagtggtaggcattttgaatatcattgcatctattctaggaattccctggatgtatgcaggccttcctcattctttacttcatgtttatgcattggcagatgtggaagaacaacaagtcatgggaagagtaagctatcgtattgtccattccagagaagttcgaattgttggcttggtttcctacttgttttcttttctgatcattctagcaaagcctgcgcttgattaacttccgattgatgtgtt

SEQ ID NO: 3774 - DNA, 411 bp, Cyanidium caldarium
  unsure at all n locations
  Clone ID: LIB190-006-Q1-E1-D2
ttcacgggtgcccccacgcgtccggaaataccaaggaaggggagagttggaaaaggagacttggcaccaatgactgaaattacttccaaagtggaaagaaaaacaacaacagcagcacttggagaacttccacaaaatattttgtttggtggattggcaggagtattgggtacaagtattatttttcctctttatacgataaagaccaacttgcaaagtagccattcacactacagctattccaccacatcgagaacaagtttggcttttatttcccaacagtggaaaataggcagtgtgattcgttccattatangaagagaaggttggaaaggaatgtatcgaggtcttactcccacgttgctangagttgcacccganaaaggcatcanactatctgtcaatgatatg

SEQ ID NO: 3775 - DNA, 353 bp, Cyanidium caldarium
  Clone ID: LIB190-006-Q1-E1-D5
tccgggtgcccccacgcgtccgaccgaacttacatcggatcacgcaccgaccgttacagatgaggaaattgaagccatcgtacaagaagaattgagtttgtttcgcaagcagacggagaaacataaacaaattacgacatgactttataaaataaatcttggaatcgttggaagaaaaaaaaaaaaaaaaaaaaaaaaaaaaaaaaaaaaaaaaaaaaaaaaaaaaaaaaaaaaaaaaaaaaaaaaaaaaaaaaaaaaaaaaaaaaaaagggggggccgcccaaaaggatcaaagcttacttacgcgtgaatgcaacgtcaaaccccttcaaaagtgtcaccaaaattcaatt

SEQ ID NO: 3776 - DNA, 432 bp, Cyanidium caldarium
  Clone ID: LIB190-006-Q1-E1-D7
ccacgcgtccgccaacgcgtccgcggacgcgtgggcaagctcaatttcaaaaaagtgcatttgttggttgagcgcgcgcgcgcgaaatgagcattcatgaagagcagacggttgccttgagcaagctagagtgttacccaaagttagttgctgagttgtatacagaagctgcccaactattctcgtctaagaagtttgccgaagctgctgacaaggttgaggcagctttgaaagagctcgatggttatcaagaagaggaaaagcaaacttggggttttgccgagctgcagcttctttatgggaggtctcttctagaaatgataaagtgttctgcttcaaataatgatgacatatttggtccaaaagtacctaaagtcgttgaactccaaggctctgactctgaagaagcagaagaagaagacgatgtttccg

SEQ ID NO: 3777 - DNA, 480 bp, Cyanidium caldarium
  Clone ID: LIB190-006-Q1-E1-D9
cctgccggtacaggtccgaaattcccgggtccacccacgcgtccgcacacgcgtccgcccacgcgtccgcggacgcgtggggtcgtccaacaacgacaacaacaacaacatgtcgtggtatcatcttcggtttggtgtttacggttttcgtgctttagaagaaaaatggatggataaacgtcaaatagatgcgttgagacttttattacaacgcaaattgagagatgcaactggaaaacgtgcagagttgtggactcacgtagaacccaacgtaccggtgaccaaaagaacagaaaaacgtatgggaggtggaaaaagtcccatcaaaggttggaaaggaagagtaaaacaaggacaaatattattcgaatgggcagctcctgtcgagattccggtagaagaaattcagtccaagtgtagtgttaggttgagaagtgtcgtggatcctgtctatcatctcgcttctatgcaacgaaactg

SEQ ID NO: 3778 - DNA, 489 bp, Cyanidium caldarium
  Clone ID: LIB190-006-Q1-E1-E3
cggtccgtaattcacgggtggcccgcacgcgtccgcaaacgcatgggtaaacttagaaatccaaatacatgtgaactaacagataaaataggtaaagttggtattgtaagaggcttaagattaacagaatctaatattatagttttgatagttgagtttgattcacaagtaagaatatggttttttgaggatgaattaaaaattattaaataaataattatttaaattataaaatatatataagattatatggggatcaatatagaaaaaataatattcttattacaagaactaaatttagatttttatcatattaaaacaaacaattatgaaattcgttcaaaaaaaaatgaatctttgctttatcacaattttaatattaattttaacatttattattcaacatttccttatttacaaactaaaactcagaatgagttatatcaaaatatagatggccaaaataataatgataaaatttttacaacc

SEQ ID NO: 3779 - DNA, 222 bp, Cyanidium caldarium
  Clone ID: LIB190-006-Q1-E1-E6
ttcgcgggtccacccacgcgtccgcatgcagaaatgaatcaaggtatgaaacagtacatgggagaaccaaagagtgaggcttggcgacaagtagaaagctatgtaaaggaacataattcttacaagctttccgatggttctgtcgttattcgattgaacaatatcgcgattggcattgaagccgagcctattgaataataaaagcattgtttgttttgttcg

SEQ ID NO: 3780 - DNA, 461 bp, Cyanidium caldarium
  Clone ID: LIB190-006-Q1-E1-E7
ttcgcgggtcgccccacgcgtccgccaacgcgtccggcaggatatgttacaaaatgttccggtgaaggtatttactttgcagcgaaatcgggacgtatgtgtgcagaagctattgcggagatttctttacaaggagaaagaattccttccgaatccgaactgaaggcgacttatctgaagagatgggatagcaagtattggtcgacttacaaagtattggatgtattacaagcagtattttatcgcaataatattgctcgggaagcatttgtggaactttgtgaagatgaatatgtgcaaaagatgacttttgattcctatctctacaagacagttgccaaaggaaatcctttgcaagacgtaagactattgtttcatacattgggagcttttgccagagcacccgctttggcaccttgaaaataaaaaagtgtgtcctgtgtgatgaattggagtttatt

SEQ ID NO: 3781 - DNA, 454 bp, Cyanidium caldarium
  Clone ID: LIB190-006-Q1-E1-E8
ttccgggtccacccacgcgtccgcacacgcgtccgcgaagaagagtttgtgaagcatcgggatgccatgatcgatcatatgcgtttttcaagttttctgatgggtaaaagtttaggtatatctgtattctcaccttatttggatcctgctatgattgcatttgccaagagtttgacaaagaaagaaaatattggggaaaagtatatccatggaaaagcccaaatatttggaaagctcttgttacgcgaagcttttcctcacgtcacttcatgttggagaaacaaggagcctattgaagtgggaagtggtacggctgccttgggaaatggatattttgaacaacttgtagatgattcgtcctttgctcgacaggtggatgaaatatggaagcacgaaggcgtgtatattcgtaccaaggaacatttgtggtattatcgaatatttcaacagcaac

SEQ ID NO: 3782 - DNA, 363 bp, Cyanidium caldarium
  Clone ID: LIB190-006-Q1-E1-F2
cggtccgagattcacgggtgcccgcacgcgtccgcaaacgcgtccgcccacgcgtccgcccacgcgtccgttatcgtttgtcaaagtttggttgttttcttggtagcagttgtacattcaacatcatcaaatgccaaagggaggaaagaaagattcttcaaagaaagaagccacaagtaaacctgcagcagcagatgctacaaagacgacagaaaagtctggtccggaagccaagttgaagggaactggtgcaaagaaacaataaaaagttgactatgcatgttcctgttatgttttgtgagttctgtttgatagtttccagctattcttttggtagtgaataaagagaaaattttttatatt

SEQ ID NO: 3783 - DNA, 420 bp, Cyanidium caldarium
  Clone ID: LIB190-006-Q1-E1-F3
gtaccggtccgtagttcaccgggtgcccgcacgcgtccggtatggggattagttgtagtggtgttgtctttgcgtgatactaggatgggaggtttcggctactttttaaagtcaactttgttttctggcagacacccggagattattccgttggtttccgctattgctctgtgtggagtttgtgcggtttttgtgagcatcgacaacttgttttataatccaaccgtggtagctctcaagtcagagcgggaagcgtattcgcgcaatgagaggcaacgtgactatgaagacagaccctttttgaagttggtgaaaccacttcgtgaccgtcctatcagttttatttccccaaatgatgaaaatagcaggattcctcattagttggatagtacaataaatagttgttgagctttatgttgg

SEQ ID NO: 3784 - DNA, 431 bp, Cyanidium caldarium
  Clone ID: LIB190-006-Q1-E1-F4
cgcttgctgtgacggtccgagattcacgggtcgccgcacgcgtccgtactcttgaaggatgtaccgtcagtgcttgaagagagttttcaagagtcgtttcttggcttcagaagcggggaaatattggaaaggaagcacaaggtctttttctagttcagctgggacccagaggaatgattggaggtcttctgtaaagaagttatctgttgctgccagcgtaggtgctgctgtggctgccttttatggaattgaaagacagaggagagcccctatttcttgcaaggaggcagaaactagtgcaaagggttccgtgaattatgacaaggtcagagaagcaattgtaaagatcattgaagaggatgataatattgctcccaccatgttgcgcttggcttggcactcttcgggaacttatgacaagaaaaccaaca

SEQ ID NO: 3785 - DNA, 455 bp, Cyanidium caldarium
  Clone ID: LIB190-006-Q1-E1-F6
ggtccacccacgcgtccgcgataaggaactaggcaaaaggatatggtatctgcggtagaacatatgaaagaagcagcaccgactgtttagcaaaaacacagcactctgcagaaaagagaaaatgtaaagtatagagtgtgcggcctgccaaatagtagagaagaaatcgatgaaagtgaaagcgagtaaaagatgaggtatagagaatggcggtcctaacagtaaggatccaaaggtagcgaagtaaatagacgtttgaaaggcgtccagtatgaaaggagaaacgagtgtagcactgtctagtcgtccaactcagcgaaacagcaataactgtgaaaatgcagtaaactagcagtaggacggaaagaccccataattcttgactagataggtttaaggaggagagagaatcatgaagtagaggaggtggggtaagagatgaaagaccactgcat

SEQ ID NO: 3786 - DNA, 344 bp, Cyanidium caldarium
  Clone ID: LIB190-006-Q1-E1-F7
taccggaccgagattcgcgggtccacccacgcgtccgcagaaaacagtgttttttagttttgtgacattaagtgccaaacggaatactatgcctgtacactttattagtacatgcgaatagaatggcagtttggcaacactatgaaacaagcatagccaatgaaaggccaggtttaggtcaggttgttggataaccacaacgcaactttttccacagctggagaacttgcactcatagcaaatatacaatttttatctttagtatgtggcaagtgcgcctagcgcatttggcgtggttggtttgcaggataaacttgtgccgcctcacaggaaagtcttttttg

SEQ ID NO: 3787 - DNA, 479 bp, Cyanidium caldarium
  unsure at all n locations
  Clone ID: LIB190-006-Q1-E1-F8
ttccggggccacccacgcgtccggagattcttggcgactcctggatatttgtcgttgagcagttgtttcattgctacggcgttgaaaataagattctatcgagaagattgtatgtccaagtctagatttcatattacagttggacattccactgcagttgcaaccgtaactttcttctctcaaatgcaaaacggaagcggagatttctcctttaagcaacgatatttttatgagagacaactggagaatgaagagtcggattctgatcctcctagagtgtttttcgctttgatcaagacagacgttcctttatgtatttatccaaatgttggtttcatagcgtctcgtttggattgggatacggaagtaaacagatgtagaattgcatttcacggacaagtagtggcgaagatgcaaaatgtggctgcagctganaagatggagacaaaagatgacatgttgcatcttacncaagataa

SEQ ID NO: 3788 - DNA, 412 bp, Cyanidium caldarium
  Clone ID: LIB190-006-Q1-E1-G1
gtgacggtccgtagataccgggtcgacgcacgcgtccgccaacgcgtccgattcgcgatggaacaaaaacctattttatactcatactggagaagttcttgctcttggagagtccgaattgcgttggcagtgaaaaatatcgactatgaatacaaggctatcaacttggtaaagaacggaggtgagcagtggggatcggagtatgagagactcaacccaagtcacactgtgccgacgttggtcgtggacggtcatactattgggcagtcagttgccattatggagtacttggaagagacccggccacaagtgcccttgttaccaaaggacccggctcagcgagcaaaagttcgtcaggtagtagaaacagtaaatgcggatacacaaccactgcaaaatttgagggttctgc

SEQ ID NO: 3789 - DNA, 383 bp, Cyanidium caldarium
  Clone ID: LIB190-006-Q1-E1-G11
cccggggtcacccacgcatccgcacacttgttcttagggcaacttgtcggggttttgttttggcgccatggtggtatgcaaatactttcttcgaggtaactgcaaatttggtcgcaattgtaagaacgaacaccctatgcagaatgctgcttccaacagttttggtgcttttcaaaaagagtgggaggatccttttcattccggagcgggacagtcttcttcagttttcaataattttggaaaccgcagtgggaaaccaacgagtcaagatccttttcgttcgttcaactcttctgggaatggcttttatcgtaaccagcgaaacaaagttgctagggatatcacttcgtccaacgacgatgcacgatgtcgtggtagagttg

SEQ ID NO: 3790 - DNA, 440 bp, Cyanidium caldarium
  unsure at all n locations
  Clone ID: LIB190-006-Q1-E1-G3
taccggtccgtgattcacgggtgcccccacgcgtccgccaacgcgtccggccagagggaaaatgaattttcaggtgttggaggtgcgtattcccaagagttgggaacagaacagcacttggagacataaacgttgtaatagaagcaacacatataggaatcgctcttttattcataatatgtcagggcttgtttgtcacagagcacttatattaatagatcacggcagtaaagttccagaggcaaacgaccaaattgccaaagttgcttctctagttgcaaagcggcttccaaatacttttgttacttttgctcatatggaattagcgaaacctgatttgatggaggctttcactctatgcgttgaaaataatgctaggaacatcactgtttgtccgtttttcttgtttcctggaaaacattgcactgtanatataccgc

SEQ ID NO: 3791 - DNA, 427 bp, Cyanidium caldarium
  Clone ID: LIB190-006-Q1-E1-G4
ggtccgtagattcacggggccacgcacgcgtccgcagcaaggaacttcgacaaactgttcgagtgcagattggagccattgctactcccgatgtcattcattgggcacctgctttaccgaaaacgagaagtggcaagattatgcgaagaattttacgtaaaattgcagagaaaggaacgcatgtctcttcggatgaacttggagatatttctactttggcagagccacaagtggttgctcaacttattgaattgtatggaaaatgaatgtggttttttttggttggtttatttgtgtgtttgtttgtgtgtgtgtgtgtgtgtgtggataattgatttttctcttctttgcctatctatattatagaatatgaggtatgatatatgaatagatagagagaaaaaatgaagaaaagatgtttcatttg

SEQ ID NO: 3792 - DNA, 403 bp, Cyanidium caldarium
  Clone ID: LIB190-006-Q1-E1-G5
ttccgggtccacccacgcgtccggaatggagtacaacaaagagagacgatgacttggattgtggatcacacagcgtatgctttcttcatgaaagctcacgattcgatgagaaaaagtagtgatgatatttgcacactactacttggtgttcatcggggaaggtccgggtttgcccacaacaacacttgctgtgttttgctcgtgagagcaccactagtggacatatccatggtggtcctacttaccagaaatgacactcgctctgcacaccttgttggtggatcctatgcccctcactcttatgtctcttgtgttggcaaaagacataaaggtccttgtggcttttatggatgcgagccaagggacacgagtctcgggttctcaagtccatggtcaagttgtg

SEQ ID NO: 3793 - DNA, 455 bp, Cyanidium caldarium
  Clone ID: LIB190-006-Q1-E1-G8
ggtccacccacgcaaccgaaaacacagcactctgcagaaaagagaaaatgtaaagtatagagtgtgcggcctgccaaatagtagagaagaaatcgatgaaagtgaaagcgagtaaaagatgaggtatagagaatggcggtcctaacggtaaggatccaaaggtagcgaagtaaatagacgtttgaaaggcgtccagtatgaaaggagaaacgagtgtagcactgtctagtcgtccaactcagcgaaacagcaataactgtgaaaatgcagtaaactagcagtaggacggaaagaccccataattcttgactagataggtttagggaggagagagaatcatgaagtagaggaagtggggtaagagatgaaagaccactgcatgaggataaggaatctaactgagtaaggaaaataagcttaagctagtttggctggggaaagtaagcctaagaaag

SEQ ID NO: 3794 - DNA, 457 bp, Cyanidium caldarium
  unsure at all n locations
  Clone ID: LIB190-006-Q1-E1-G9
gcctgcagtacaggtccgaaattcccgggtccacccacgcgtccgaccaaagcaagttacctagtacccgatacacataccgttttatcgattctggaagcattggagacagacgatcatgcgacagaaagttagtaacctgcacttttcaggtaatcgactattcttcctacagccgttgcacactcggcagcagatacaggtttggtaaatatcgctatgatgagacacatattggtttgcatagctacaaagccatcgtcaccctatattgcaatgatcattatgcatacactctcctacatccatatatatacacatacacacacacagagaaagtgtgcgtatgtgtgtatggtgcagagagaatgtgaaagaaacattgttagatataataatgaaaccaacgacaaaaacttgccagtttcncataaatagtatcttctgtcgaacgcac

SEQ ID NO: 3795 - DNA, 438 bp, Cyanidium caldarium
  Clone ID: LIB190-006-Q1-E1-H2
gcggtccgagattcacggggccaccgacgcgtccgcaaactctgcgaagcgtggtgggagagaccgaacaaatgataaaagtgcgactacgagaagagtgacggaaactagtagaggaagaggaagtggaagagcaagagctccattccgtggaaacaacggacggaatgagcgccctccaagagaaaggaatattggaagaaacgacaagaaacctttctctagaaatgatcaaaggccgaagaggactcccaaagaagcatcggaaaagaagcaacgtggacctgctcctaatttgacggatgattgcaaacataagttgaccttttatttgccagcaaacggccgctatcttcgtgcttgggtagatcctggaagtgagtctcaaacacccaaaagaaacgacgctggacatgtcaaagttgcttttcgttcttc

SEQ ID NO: 3796 - DNA, 273 bp, Cyanidium caldarium
  Clone ID: LIB190-006-Q1-E1-H6
gggtccacccacgcgatccgggaaattgtattgaagaagcaatcgaatcttgccgttgctgcggatgtaacgaccagtcaagaattattatccattgccagtcaagttggtccacatatatgtgttttaaagacacatgtggatattatcgaagattggaacgaacgtgtgtgtgagcaactcgttcatttggccaagtcgcatcagtttttgatatttgaagatcgcaagtttgcagatattggcaatacggttgagttacaattcactggc

SEQ ID NO: 3797 - DNA, 371 bp, Cyanidium caldarium
  Clone ID: LIB190-007-Q1-E1-A4
acccacgccgtccgaaaaggaatggcggagaaaaatcaaacaagtttcctcaaacgaacagaaaaacggtcaaaaaacacaaaaaagggttttgaaaaaaaattttgcaaatttttcccccttcaaggttttcaattcctcccatgaggaagatgatgatgatggaggagctttgaaactgtcctttctggatttcattccttgcttataactttgccaaaacttccacaacgtccgcttctttctttgcaactccagattgctttcatgttcctccagatttgcgaaaaatgtatttagttctatattcaaagtagattcctacatgtcctttcagtaaatcaaacgacgacgtccattgtatacgaaaa

SEQ ID NO: 3798 - DNA, 407 bp, Cyanidium caldarium
  unsure at all n locations
  Clone ID: LIB190-007-Q1-E1-B3
attcncgagtcgacccacgcctccgcccacgcgtacgggactttaagggaaccctcttcccctgttggggttactgttggtaaataatggtaaaaaatggaatccaaattgggaataaagggtttgggaaaatttgaaaggcaattcctaaagctgccttggggaaacaatccgttaaagttggaaccaacaaccattcctttaatgatttggactaaaaggtccaaaagttcaaataatgactctgttcaccgggcctatccaagtacagtggtagcaaagaaatggaaacttgtcgtggatggacacgaaatggcagtgtttgccttccgtgaccctagtgagatcccttggtcctctactggagcagaatatattgtggaatcaacaggagtatttactgctgc

SEQ ID NO: 3799 - DNA, 407 bp, Cyanidium caldarium
  Clone ID: LIB190-007-Q1-E1-B4
cacccacgcgtccgaaaagattgccataggaaattggaccaaaaccttttcaaaaaatttaagggtaagcctcctccttctcctcctcctccctaaaccttcaataccaacaacaattactggaaaacctatttgtatttaggtttctgcgctattaaaagaaggagatcgcgtattgaatgctattcgaaagcatacagttcctagtggtatgtttacagaggagattgatcgatatactggtttcgagcaaggagctatcaatttaacttggagttatgatgcctttgttactgcggtttggtcgagagaagatgttcacaagttgttttctaaatattgtgaacctccttctccatctctacctagtatgccaggacctggtggtttatcttctccatagtaag

SEQ ID NO: 3800 - DNA, 484 bp, Cyanidium caldarium
  unsure at all n locations
  Clone ID: LIB190-007-Q1-E1-C11
ggtccggatatcncgggacggcccacgcgtccgatggaagttaggcaatgtttgcttgttttcatatgtctttcagctctgttaggttcaactttggctgcttctggtgcaacgtctatttactcgttgcttcagagtaaaagagactatacttttacagtgcaaagcatagagctggctaatctaacagatgtatacaacagcagtgtactggactttaccttccttgcttccaatgacactgcttggaaacaatccagagccaatgtcactggtgcacttagtgcagcaaaacaaaacgtaacaggagcaatagcgtttctagaacgcttgatagcagcaagcacagtgaataaaacggtggagtttagtacgctctctagtggtacgaaagaggttgtttctctggcatgtttgccgcttaatttcacgaaaaattctactggagactttgtggaaggtgattcggtctctgctgctgacg

SEQ ID NO: 3801 - DNA, 195 bp, Cyanidium caldarium
  unsure at all n locations
  Clone ID: LIB190-007-Q1-E1-D10
ctgcgtctnacggtccggatattccgggacgagccacgcgtccgcccacacgtccgggagagttggcatttgaaaatattgcacaagcgtttgaagatttacatagtggaaaagctattcgaacagtgttgaaatattctcaggaaaagaaataaaaaagaaagagagagagtgtgtgtgtgtgtgtcttaaaaa

SEQ ID NO: 3802 - DNA, 322 bp, Cyanidium caldarium
  Clone ID: LIB190-007-Q1-E1-E7
aggacgcgtgggtttggttgttttcttggtagcagttgtacattcaacatcatcaaatgccaaagggaggaaagaaagattcttcaaagaaagaagccacaagtaaacctgcagcagcagatgctacaaagacgacagaaaagtctggtccggaagccaagttgaagggaactggtgcaaagaaacaataaaaagttgactatgcatgtgcagtcctgttatgttttgtgagttctgtttgatagtttccagctattcttttggtagtgaataaagagaaaattttttatatttaaaaaagacaaaaaaataaaagaaaaag

SEQ ID NO: 3803 - DNA, 440 bp, Cyanidium caldarium
  unsure at all n locations
  Clone ID: LIB190-007-Q1-E1-F3
cacccacgcgtccgagcatggaacaagaacaagtaaaacattatcaactggtggaatttgcaaaacacattaccaaaaaggatgcttggattgtgttggacggaaaaatatatgacgtgactcgttttctggacgaacatccgggtggagaagaagttctacttgaagttgccgggcgtgatgctacgagagagtttgaagacgttggtcactcggatgaggcaagagaactacgaaacaagtatttcgtgggagtagttcgtagtgaaacgaaagaagaattggaacgagcagaacgagaaggaatcaagccagtgcagtctgcgaaccaaccggaagtacccttgtggaagaaactgcttattcncggtatcctcgtggttatggcctttttgattcgaaagtatatttcctaagagactattttgtgacattttttt

SEQ ID NO: 3804 - DNA, 342 bp, Cyanidium caldarium
  unsure at all n locations
  Clone ID: LIB190-007-Q1-E1-F5
ttttctctctcttttcttctactcctttcggatttctattatgacgccgccttacactctcttctttctacttccttctctcgtaaacctttcctctttcttaccttttacttcccttctcttgtttcgctactccacccagcattctctcttctcttcttgctcctctacctcttaccctgattcggtcctctttctatcctgtttctcttccacagacaacaaagtcgagactgttgtgcatcttactgtgttgcctcctttgctaccaatgcttatttgcggtagaatcttcgagcaatgcgtcttgtancagctcaatgataatactgtgctattaga

SEQ ID NO: 3805 - DNA, 412 bp, Cyanidium caldarium
  Clone ID: LIB190-007-Q1-E1-G1
acccacgcgtccgcatccttatattctttgtgcttggacaatggttgcaaagactgctctgagttgcctctttctctctttccttatcgctgccgcagttgcagccgacgtagtttcagaggagagatggggatatgctcagcaaacccaacaacagcaacagtgccaacaagtatgtaaacagtatgcatactatcagagtccagtctgcacttccgtaaccacacagagcccatactggacccaatgctcgaagactgtgcaaacctttgtcccaagccagtgcagtacttatacccaatctcctacatggacctattgcagcacctacaccaccactagcgtaccatctcaatgcagcaaggccgtgactacctatactcaaacctgctgtgcttatgcccaacaaact

SEQ ID NO: 3806 - DNA, 416 bp, Cyanidium caldarium
  Clone ID: LIB190-007-Q1-E1-G2
cacccacgcgtccggttgaattattctgtttcgtttacttgtctttttgttgagttatcatggcacgaacaaaacaaacagcacgcaagtctaccggtggtaaggcacctcgaaagcagttggcaaccaaggcagcaagaaaatccgcacccgtaactggaggagtgaagaagccccatcgttaccgtcccggtactgtcgccctgagagaaattcgcaagtaccagaagagcactgaacttcttatccgaaagttgcctttccaaaggttggttcgtgaaattgctcaagactttaagacggacctacgtttccaaacttcggcggtgactgcccttcaagaagcctcggaagcatacttggtcggtttgtttgaagataccaatctttgcgcaattcatgccaagcgtgtaact

SEQ ID NO: 3807 - DNA, 370 bp, Cyanidium caldarium
  unsure at all n locations
  Clone ID: LIB190-007-Q1-E1-G3
tccacccacgcgtccgataaaaggtaaaaaaaaggaaaaggaaaaaaaaaaaggttaggctaaaaagcaacaaacaaaaaaggaaacctttaaagcatgaaaaaaaaaaaatccgaaaaaaaaaagaaaaaggtaagaaagaggaccgaatcagggtaagaagtanangagcaagaagagaagagagaatgctgggtggagtagcgaaacaagagaagggaagtaaaaggtaagaaagaggaaaggtttacgagagaaggaagtagaaagaagagagtgtaaggcggcgtcataatagaaatccgaaaggagtagaagaaaagagagagaagaaagaaaagaagagaaaagccgtactgaagaccgacac

SEQ ID NO: 3808 - DNA, 440 bp, Cyanidium caldarium
  Clone ID: LIB190-007-Q1-E1-G7
cgcctgtcggtaccggtcctagattcccgggtccacccacgcgtccgatttgctgtttatgtcgaagcggggcatcttttacaatgcgcccttcaactgcagttctaaagtttcaaagtttctgtatacttgcactgtaatttttctggctttttggatcctatcttctgtctatttgaaacctgtaccatcttacaatgaggccactcaacggaggttcttttaccccacaagcaaccctactcggatcccaagtatcatccaccaaagttggaagaccaacgacgtcccagaaagatacaaaagatggatacagagttggaaggaactgcatccaagctggaaatatatactttggacagaccgaacaaatagaaaacttgtgcttagacaattcccttggttgattgacatatatgacagactgccagtaaatattg

SEQ ID NO: 3809 - DNA, 440 bp, Cyanidium caldarium
  Clone ID: LIB190-007-Q1-E1-G8
ggtcctagaattcccgggtcgacccaagcgtccgaccacgcgtccgcccacgcgtccgcccacgcgtccgcgcggacatagaatggcaacagataaagtcagctaagaagatatactcttatgtaaaagaatcaaaaaccaaagaatatttggagctagacgattcgttgcagcagccagtggattcatcttgtagcaccaagtggctgtttattgcaaccccactgttggaagttgcttgtactgatgggcagcgaattgaaatgattcctttgaagaaagatataaaggaattgtttttctctactttaaagaagaactttgagtcgaacgaagcgtcatgggagtgcagtgtagttgaaaccgcagttgctgtttttatccagtattatgaacagtgcgtggaacagtactatctagcaggcaaagattatgagcta

SEQ ID NO: 3810 - DNA, 408 bp, Cyanidium caldarium
  Clone ID: LIB190-007-Q1-E1-H5
accacgcgtccggtgtgcggcctgccaaatagtagagaagaaatcgatgaaagtgaaagcgagtaaaagatgaggtatagagaatggcggtcctaacggtaaggatccaaaggtagcgaagtaaatagacgtttgaaaggcgtccagtatgaaaggagaaacgagtgcagcactgtctagtcgtccaactcagcgaaacagcaataactgtgaaaatgcagtaaactagcagtaggacggaaagaccccataattcttgactagataggtttagggaggagagagaatcatgaagtagaggaggtggggtaagagatgaaagaccactgcatgaggataaggaatctaactgagtaaggaaaataagcttaagctagtttggctggggaagtaaagcctaagaaagag

SEQ ID NO: 3811 - DNA, 352 bp, Cyanidium caldarium
  Clone ID: LIB190-007-Q1-E1-H8
aagctccaactcaagagcaagatagacagacaacgcaaaggttgaaacgatgatcatttgaaggtgccaggcgcaggaggcaaacttaaaagaccagtttgcaactgtccagaaggtccatttccaaaaggtcctcctccatatccaagcatcggagtttgctgagttggttgtaatccctgaagaacaaccgaaggatcctcgttgatttgtgcttcttcagcttgttgcttctccttcttacgctgaagttgtgcagctctttcgctttctaacctaccgagtctcgaggtgaggtcatgtaacttttgaatcatataaggcatagtaaagtcggtagcttgatgttgcc

SEQ ID NO: 3812 - DNA, 458 bp, Cyanidium caldarium
  Clone ID: LIB190-007-Q1-E1-H9
cggtccggatattccgggtcggcccacgcgtccggttattgcactaggtgacaaggaagataagagcacagtcaaagtgggagatcaagtgaccgctgaacaaatcgtggcttgtggaaattgtctttattgtcgcaagggtcttcgttggctatgtgctcctcacgatatatttggctatcatcgttgtgttcacggtggtatgggacaatatatgcggtttccagaaaaaagtatcatctacaacattcccaagaaaatttccccttccgaagcagtatatgtggaacctttaagttgtggtgttcatggagcacagagaggtcgtattgaattgggtgatactgtagttgtcagtggttgtggtcctattggcttaagaatggttgccgctgcaaaactggctggtccttctcgtctgatcgctttggattgtatggattcaagactagatattg

SEQ ID NO: 3813 - DNA, 116 bp, Cyanidium caldarium
  Clone ID: LIB190-008-Q1-E1-A2
attcacgggtcgacgcacgcgtccgcccacgcgtccggaaatgtggatgcctccgatggtggaaagaaagaagaagcgtgcttggattgttatcgttgccagggttggaaaacaat

SEQ ID NO: 3814 - DNA, 374 bp, Cyanidium caldarium
  Clone ID: LIB190-008-Q1-E1-B1
tccggcactctattatattggttatcaagtcggagtatcgcctttggcttgggccatcaacggagaaatttatgaattgcacgtgcgcaattggggaatgtcgtggggtgcagccattcttttgggttccgcattctcagtgagctatacatttaccagacaagtacgagcatttacgaaaactggagtatttggattgtatgcaggatttaccctcattttctggtttatccttatcattttaatgcctgagacaaatggaagaacgctagaagatattcgaaatatattcgatgaaggtttaattggattggcaaaatacaactggagccaaaccaaaacatgggtcaggacgaaattagggaagcagcatg

SEQ ID NO: 3815 - DNA, 413 bp, Cyanidium caldarium
  Clone ID: LIB190-008-Q1-E1-B3
gtagccgtccggaattctcgggtcgacgcacgcgtccgcccacgcgtccgcccacgcgtccggtttgggataatcttcactccagtcaaccaaaatatcgtttagatcagcatcttgcagctgtaaaagccattgcttggtgtccttggcaatctcatttacttgcaagtggtggaggaacggcagatagaacgatcaagttttggaatactacaactggctcctgtttacagtccatcgatacaaaaagtcaagtatgtgctttgctctggaatagacatgataaggagatcgtcagcagtcatgggttttcacagaatcagctcatcgtatggaaatatccttcgatggtaaaaattgcagagttaactggacacacttcgagagttttacatttggctgcaagtcctgat

SEQ ID NO: 3816 - DNA, 324 bp, Cyanidium caldarium
  Clone ID: LIB190-008-Q1-E1-C4
accacgcgtccgcaaaatttgagactcttatagaagaatatacgtttcttggtgtggagacagaagcttggactaaaaaagaaggaaaatatgctcaagggaaactcgcattatccatggcttctttacttttttgtgatacctgatagtaaagatgaaagtagagagtatagttttctgtggtttttttccttgtgtcttgtgaaagtatagagagatggagtataaaagactttttttgattaaaaaaataaaaaaaataaaaaatataaaaaaatcagaaaaaaaaagaatagaaaaaaaaaattttcaaaaaatgtatac

SEQ ID NO: 3817 - DNA, 376 bp, Cyanidium caldarium
  Clone ID: LIB190-008-Q1-E1-C6
gtatgaaaggagaaacgagtgtagcactgtctagtcgtccaactcagcgaaacagcaataactgtgaaaatgcagtaaactagcagtaggacggaaagaccccataattcttgactagataggtttagggaggagagagaatcatgaagtagaggaggtggggtaagagatgaaagaccactgcatgaggataaggaatctaactgagtaaggaaaataagcttaagctagtttggctggggaagtaaagcctaagaaagagtaaattaggcaagcaaaggcatgagagaagtataatagcagaagcatgcttgaagaaaaagaaagagatttcagaaagggaagaaaagtcagctatagagaacaggtgaaggag

SEQ ID NO: 3818 - DNA, 408 bp, Cyanidium caldarium
  Clone ID: LIB190-008-Q1-E1-D1
tagccgtccagaattcacgggtcgacggacgcgtccgccatttgaatggtgactactcgaagttcgtcaaagaaaatacaaagtctgtcaagaacagagaaagagaatgacaattcagatatcaactcgtcgtatacaccgtatcaggaaacctgttccaaaaacgacagtaagtgtcctatatcttcaacaaaattcttccaactcgattcaaaaggctccacggagaaaacaggtaacaaactgacaagggaacttgcggcacttggagtcattacacatccaaagagaactcccaagaaaaacttggattttgaaatgttctcttccatgaacttaaatgttgaaagcgctgatacacgtaaggaatatgaaaagctaagaataggaacttacacgtcatagacg

SEQ ID NO: 3819 - DNA, 398 bp, Cyanidium caldarium
  Clone ID: LIB190-008-Q1-E1-D2
attcacgggtcgacgcacgcgtccggtgtaagctgaaggatgccttgcggttcttgtggtcgggtttctagttgtgcttgtggagaaaagtgtccgtgcgctacgaagcattgtcattgtggtgaccaaaattgtcgctgtggtacaaaatgtactggtttgagtgctgaaacctccaagtgttgtgaccgttgtcaagggaagacctgtggttgcacgcgttgcccatgtgaagcagctactagctacaagaagtatcgccgtttttcagtataagatacctgagtttgtaggagttttgaagtgtactcatccagaaaacttacatgttgaaagcgctgatacacgtaaggaatatcaaacgctaagaatatgaacttacacctcatccacgattc

SEQ ID NO: 3820 - DNA, 426 bp, Cyanidium caldarium
  Clone ID: LIB190-008-Q1-E1-E1
tccagaattcacgggtcgacgacgcgtccgctgagcgcaaggattgctagtttcgtcgcaaaaacgacaaacgatagagaagcttcagagggagatcgccctgtaacgaaaagtctcttgctgcacagaagatattataacagcttcgcttcctaggtgtgaaaacctacgttgcgtttcgactggtctattcggctgtctaccagttactttttcctcataggtcttcgagtcccataaagacgtcgatttgtacaaacgacttttctctcgcgatactgtgtttgctgcctttccagaaattactcgaaaaaagcggtagcgacactgaatacctgtccttcctgtgccaagagtccttgcaatatctgaccatttactgccaacttccttttaaagtttcaataacttccccgtttcctcctt

SEQ ID NO: 3821 - DNA, 418 bp, Cyanidium caldarium
  Clone ID: LIB190-008-Q1-E1-E3
tagccgtctagaattcacgggtcgacgcacgcgtccgcccacgcgtccgagctttccactccgtaattattggtctgaatcttggaataagcacaggatcgacattccgtacgttgtttgctgctctcgtatttcatcaattctttgaaggatttgctgtcggtactactgtttctgaagcccattttggcacttggatcactatagtaatggtactttgctattctttggaaactccaatcggtatatcgattggtattggtaatgcacacacttatcaggaaaactcctcggcatctttgttaacgagaggcattttggatgccatctccggtggaattttaatatacacaggattggtggagttgttgacttattggtttacgcgcaactcgaactttttaagacgcaaagccat

SEQ ID NO: 3822 - DNA, 442 bp, Cyanidium caldarium
  Clone ID: LIB190-008-Q1-E1-E5
acgccgccaggtaccggtctagaattcccgggccgacccacgcgtccaagatattttattctgaaaattggtactcgagagtttcctgtggatatgcctaaagacgtttatagtcgagtagccaatattttgagtattctttatggaggagacttgaagcgtcaagtatacaaaacaacttttacaccagacgactatcaacagttggaacaagaaaaggatttattgttatctctttgtgcattgtatatatgttatgtcaaacgtttaaaaggacttccttatgatacccttgcaacctttcatttaggaaatggagctgaattatcggatatatgttggatggcagataattccccaatggcaatgacgaaaaacctttgtttaatggcattatttagttatcgattggagtatcaagaagaaaacgtgattatatttt

SEQ ID NO: 3823 - DNA, 439 bp, Cyanidium caldarium
  Clone ID: LIB190-008-Q1-E1-F1
attcacgggtcgacgcacgcgtccgaaacattattatctactgtaaaacctcgttttctttgttctgcgcatcaaccaccaccaccaccaacaacaaaagacctccatggtatttttcctgtatataaacctcccaactgtacatcctttcaagtcgtaaaaaagatacgttctatcatcttgaaagaaatcacttcttccaacgctggaactggtcgcaagtggatcaaagttggtcacggtggtactttggatccatttgctaccggtgtattggttattgcagttggttcagcttgctcgcagcttcaaagttttcttcaaggttctaaagtatacaaagcaaccgtgaagtttggtgaagaaacggataccatggatctcactggccgagtgatagcaacccaacctgttcctcccaaaataacgcccgatgaaa

SEQ ID NO: 3824 - DNA, 380 bp, Cyanidium caldarium
  Clone ID: LIB190-008-Q1-E1-F12
ttacgctccacgcagtgtgagttgtcgttgcgcagtgtttgaaagttatagtattacttattgttcttggttggcacactactgatggacgcagaatcgagagagaaatctgtttacctttccaagttggcagaacaagcggaaagatatgaagaacatgaggaagaaagaggcaaatacgggaaagcagtaaaagaagaaagagaaaggaaaaaactgagtatcaggaagaaaagagggagtagatgaggaaagaaagatcaaggaagtaagagtaagagaaggagtaatgtgaatgaaagcaggaaagtatttgaagaagagagtgtaaagcgcgtaccttttgcataatgtcccagcgagtgaaagaggaagcaaaa

SEQ ID NO: 3825 - DNA, 414 bp, Cyanidium caldarium
  Clone ID: LIB190-008-Q1-E1-F2
tccagaattcacgggtcgacgcacgcgtccgcccacgcgtccggttgaagaaaaaagagttgtctgaggaccaaacagagtgacaagaagagatggcaaggagaatattgggtgcttatatgggagatgccacagtggcaactctgttcagtatcaaaatgttgttctatcttactatcatgggtttctccataactatcttggctctcatgggaaagaactcggatggtatttggatacatagtgtgccacctgcagaacaatattgtgcatacaagtcttcattggaggtgaaccaccatggaattgcttcctattgcaagtatatcgttgccgtagctgctattgggttggttatctcgtttttccagttttgctacggtctgttgggtatctttttcaagtggcaacaaa

SEQ ID NO: 3826 - DNA, 458 bp, Cyanidium caldarium
  Clone ID: LIB190-008-Q1-E1-G1
tagccgtccagaattcacgggtcgacggacgcgtccgtcatccaccagctattattaccgagcagctgctcctcagagatggtatgaggaacaatgcacctcatactgctgggttccagtacagacctatgaaacttatcaatgttctcaagagaagaagaaggagtacagctatccttgtcaaacttatgagcaggtttcaactacttaccagtgtggtcagtacgagtcccaacaagtttactaccaatgccaaaagtataaggaggttactcagcaagaatgccagtacgtccaagagtcgtattgtgtcgagtatgaagaatgtcagcaagttacccaggaagtttctccttcagaaattgtctactacggtgaatcttcttctagcagtagttactactactagaacacttgtgaaatgcccaaaattcccaaattaaattgtccttttttga

SEQ ID NO: 3827 - DNA, 405 bp, Cyanidium caldarium
  Clone ID: LIB190-008-Q1-E1-G2
attcacgggtcgacgcacgcgtccgccaaaatgttatttaaaggacggcaagacttggtctatcgaataccagaactccaactacaacattgaagtggaagtgacagacaagaagcaatcggtatatatatatcgttgtaatgacaccgtagtaaaggtaactggaaagtgcaactctatcaccattgatagttgcaacaaatgtggagttgtattcgaaagctctttgagtacttgcacagtggtgaattgtcgttcagttcagctccaggtggagaaacaagctccgagtgtgacgattgataaaaccgacggcgcaaatatctttataccatcaagtattgtttcggaaacacaggttgtttaagcaaagtcttcatccgttaatgtaactgtcacaaatga

SEQ ID NO: 3828 - DNA, 409 bp, Cyanidium caldarium
  Clone ID: LIB190-008-Q1-E1-G4
attcacgggtcgacgcacgcgtccgcgcgaacgcccgaattttgtgtttctcatgaagcgttattattaccttacgaagaagcactaacgagatatgacgaggaaaccggcaaatattatgcaacttctggtcattttctatgggttggagatcgtacgaggcagccagattgtggacatgtggagtttttaagaggcatcgacaatcctatcggcatcaagtgtggaccatctttggcagtggatgatttacttcgtttgttggatattttagatcctgataatgagcctggacgtattacactgattgttcgtgttggagcgggtcgagttgccgaacatcttccaaggtttgtaaaagcagtgcgcaaggaaaatagacaagtcgtgtggagttgtgatcccatgc

SEQ ID NO: 3829 - DNA, 205 bp, Cyanidium caldarium
  Clone ID: LIB190-008-Q1-E1-H12
agcaaagtcaatggaaaaggaagaggaaaggcgaaaaaagtagcgaataaaccgagaaccttacctctccaagaaggtgttgcacggctgtcgaaagaacgtgctgtgaagtgagagaacgtacgagaaagccaagtgaggaaaagaaggcaagtagagggcggcccgagaaaggagagggcgtaagacgtgatacagagtaaaa

SEQ ID NO: 3830 - DNA, 415 bp, Cyanidium caldarium
  Clone ID: LIB190-009-Q1-E1-A1
attcccgggtcgaccaagccttcgaccaacccttcggccaacccttccaaaaatgatgatgacatttgtgaacccttgtcgcccctttacgggactttggaatcctttgataaaggtatcatcttgccttaaaaatatactagaatggtttcatattattgtctactatgttgggatgggggctcgctccaactcttgttgtgttgccacaaatctgtactttttgcgagcttctgcaagtcttccacaaaagtcaaaagcaataccttttctcgatcgtccgcctgctttggatggttccatggttggcgatgttggtttcgatcctttgaatatctcgtcctatttagacttgcgttggttacgagaatccgaactcaaacactgtcgcattgctatgttggctgttgtgggt

SEQ ID NO: 3831 - DNA, 370 bp, Cyanidium caldarium
  Clone ID: LIB190-009-Q1-E1-A12
attcacgggtccacccacgcgtccgaaatgtggaaatggaagaaaatgcggaagaagttttattcacttttaatagaccttttgaaatatacgatgaccaagtcattttgcaaggaatatttcgaaacacaaatgtttccaacagaagagacgaacatgaaaacgtatcggtttctgagaagcaagcatattcaagtaattctagacagtccagtgagccaagtcaacattcttgtcttcgaactagtttactgtctagaaacactgtagataatagtatgtttaatagccatttggtttacctaacagatgatgtctgaggtcgtcaaagttacggttgataagcagtaaaaactgactgatatgtggt

SEQ ID NO: 3832 - DNA, 461 bp, Cyanidium caldarium
  unsure at all n locations
  Clone ID: LIB190-009-Q1-E1-A3
cgggtcgagccacgcgtccaccttgtcgtctatcatagacacacgttaaccttggtccattactactaggaatgacccttcgtaaaccagtctttaccaaagtagaaaaactacaacccgggacacaggggcacaacttgatcgttcaagtgatgaacgtcggtgaggttatggaaaaagtgagaccgagtggtgacaaactgcaaatcgccgaagtgctacttgcagatgaaactggagcggtattatttacagcaaggaacgaacaaatcaaactttttaaaaagggagagtgtgtgaccgttcgaaacgcaaaagtcaatatggtgcgaggctttattcgtttagtagttgacaaatggggagctattaagccgcctggaccaacggaaaagttacaaggaccaccaaaagttnaaaaccattatttcaaacatagaatatgaactcgtgtaagacac

SEQ ID NO: 3833 - DNA, 395 bp, Cyanidium caldarium
  Clone ID: LIB190-009-Q1-E1-B10
ttcaagggtccacccacgcgtccgaaattgagcaatgtacagggaagtatgacccagtaatgaggagtggagtaaacagaaaaggaagtaaaaggagggaatgaagggaagttatggcaaaaacacgtgccagcagcagcggtaaaacgtgtgtagcaagcgtagagcagaagaacatgaggaagaaagaggcaaatacgggaaagcagtaaaagaagaaagagaaaggaaaaaactgagtatcaggaagaaaagagggagtagatgaggaaagaaagatcaaggaagtaagagtaagagaaggagtaatgtgaatgaaagcaggaaagtatttgaagaagagagtgtaaagcgcgtaccttttgcataatgtcccagcgagtgaaagaggaagc

SEQ ID NO: 3834 - DNA, 449 bp, Cyanidium caldarium
  Clone ID: LIB190-009-Q1-E1-B11
attcacgggtcgacgcacgcgtccgaccacgcgtccggactacttagtgatcgtatatcgcaacttaaagttgagttggaatatgttcgttcgcacagggcaagacaacgaaagaaaagaagacattttgaagttcctgtcgtttctcttgttggatataccaacgctggaaagagcactttattgaatgctttgactcatgctcaagtactagtacaagacaagttatttgctacattagacccaacaactcgaagatgtcgactacctggacttcatgtgcaccccgacatccttatgacagatactgtcgggtttatccaaaaacttccgactactctagttgccgcatttcgtgctaccttggaagaaatagctgctgcagatattcttttacatgttgtcgatatttcatctccttccttcgaatctcagcaacaagctgtcat

SEQ ID NO: 3835 - DNA, 468 bp, Cyanidium caldarium
  Clone ID: LIB190-009-Q1-E1-B12
agctgcggtagcggtcctacattcacgggtccacgcacgcgtccgaccacgcgtccgcccacgcgtccgctcttgaagcactgaagacgttgaacgttgcctctcccaaccacaagacaagatctaacactccaacaacttctagtagtaaccgaaaaacaacacctgacttttcggaatcttctcgttacctctcctctccatgctctacaaaagatggaaaagtacgagtcctagaatccgaatttgagaagcacgttgcaccctttgtgaaacatagtgtctctgtatcagaactatctgaaaaacttcatttactgcatcaggcatcttctaatcgaaactcgaagcgattcagtcagtccgaactttctaaaatctttcaagcatcgagtagcaagcttaagctatattgcctcgctcttgttcagctaaaatatcttcgaataaaaagggatgatctagttt

SEQ ID NO: 3836 - DNA, 396 bp, Cyanidium caldarium
  Clone ID: LIB190-009-Q1-E1-B2
cgggtcgagccacgcgtccacggaagcgtgggatgaaatgcagagatctctagagaaaggcaagaaagaaaagaaaggaagacacagtaaatgaggcgagaaagcataggaagtgaaacggattaggaacccgtgtagtctatgcagtaaaagaaagaatgagtaagaaaaaagggagtcattccaccaggggagtaaaggcgcaagaaagaaacccaaagcaattgacgggaatcggaaaaaggggtggatcacgtaaattaatccgatataaaccgagaaccttacctctccaagaaggtgttgcacggctgtcgaaagaacgtgctgtgaagtgagagaacgtacgagaaagccaagtgaggaaaagaaggcaagtagagggcggcccgaaaa

SEQ ID NO: 3837 - DNA, 313 bp, Cyanidium caldarium
  Clone ID: LIB190-009-Q1-E1-B4
gggtcgagccacgcgtccagttcaggttgacgatcctgagaagattgcttgaaacttttaaaacaaactttggttgtcgcgcaactctctatcgagtttttgggtatctgcagtcggaacaactacttgcgtgcatgctctcgtgatcactatataaaaagtagtctcttctaaaaaaaaaaaaaaaaaaaaaaaaaaaaaaaaaaaaaaaaaaaaaaaaaaaaaaaaaaaaaaaaaaaaaaaaaaaaaaaaaaaaaaaaaaaaaaaaatataagaaaaaaaaaatagaataaaatcacctaagaacaattca

SEQ ID NO: 3838 - DNA, 409 bp, Cyanidium caldarium
  Clone ID: LIB190-009-Q1-E1-B9
acgcgtccgaaaatggcggtcctaactgtaaggatccaaaggtagcgaagtaaatagacgtttgaaaggcgtccagtatgaaaggagaaacgagtgtagcactgtctagtcgtccaactcagcgaaacagcaataactgtgaaaatgcagtaaactagcagtaggacggaaagaccccataattcttgactagataggtttagggaggagagagaatcatgaagtagaggaggtggggtaagagatgaaagaccactgcatgaggataaggaatctaactgagtaaggaaaataagcttaagctagtttggctggggaagtaaagcctaagaaagagtaaattaggcaagcaaaggcatgagagaagtataatagcagaagcatgcttgaagaaaaagaaagagatttc

SEQ ID NO: 3839 - DNA, 433 bp, Cyanidium caldarium
  unsure at all n locations
  Clone ID: LIB190-009-Q1-E1-C10
cacgggtccacgcacgcgtccgaccacgcgtccggagtccctggtacttctaagaacaccccgaaacaggtggactacttgggcgccattcatgtcgcagaagcggcagcccaagctaaggttaaacgtctcatcttggtaagctcagcaatggtgactaaccgaagttcattcccttatttgttcttgaactctgcatttggacgaattatgcattggaaaaggcaaggagaaattggagtcatcaaagttcatgagaaaaatccagaaatggcttatactattgttcgcccaggacacctgataaatgagcctgccaaagggcccaagtcagtaatagttgatcaaggtgatcgcattagttggagggttactanagcggacgtagcgaaagtatgctgtgcttgtttaaaagtcgaaaatacgatgaatg

SEQ ID NO: 3840 - DNA, 405 bp, Cyanidium caldarium
  Clone ID: LIB190-009-Q1-E1-C2
gggtcgagccacgcgtccgaccacacgtccgcccacgcgtccggcagcatgatgaagagcgctatgaagttctttgtatttagcattattttggcaaatgttgttcttactattcaagcagcaacggttttggagactttggagtcactgaaatatacagagtatcttgacatggtaaaggctgcaggcctggactcgaagttcaacgactctgctgttacatggactgtttttgcagcaaacaatactggagtcaatgccaccttggcaccaaagcacttggttatttctaatatcacatctaatgcgacggagagcaaagacattgtggaatatactttgtacaaccatactcttttgtcagatgatattaagacaggaacaactatccttaccgccgtaaac

SEQ ID NO: 3841 - DNA, 455 bp, Cyanidium caldarium
  Clone ID: LIB190-009-Q1-E1-C3
gggtcgagccacgcgtccaggaagaagcagagagggactatgagcgagaaggtggatagtcgagagggaaaaagcccagaagccaagataaggtatcaaagtaaagaaagaaggaaaaggagaagaagagagggtaggcttagaagcagcaaaccagagaggaaagcgttaaagcatgaaagaaaagaaatccgaaaaagaagagaaaaaggtaagaaagaggaccgaatcagggtaagaggtagaggagcaagaagagaagagagaatgctgggtggagtagcgaaacaagagaagggaagtaaaaggtaagaaagaggaaaggtttacgagagaaggaagtagaaagaagagagtgtaaggcggcgtcataatagaaatccgaaaggagtagaagaaaagagagaggagaaaggaaaggaggagaaaaccgtactgaagaccgacacaggtac

SEQ ID NO: 3842 - DNA, 334 bp, Cyanidium caldarium
  Clone ID: LIB190-009-Q1-E1-C4
cgggtcgagccacgcgtccacccaagcgtccgggaaaacgcgaggtcattggatatactttggaagcagctttacagaaaacttgtattgtggaaaaccagttgagggagtggaaaaagaaactcgatagtctagcagacaattattcgttgggtacgagagcctatgatgcgagaatgtggtcattggacctcatcgcaactattatgagtgtctgttttgcagtttttggaatgttttcacaattctttggttattatgtccaattgcccatttacaatatgggaaatgccagtcagtattacttttatggcgtgatgggaggtatttccgt

SEQ ID NO: 3843 - DNA, 439 bp, Cyanidium caldarium
  unsure at all n locations
  Clone ID: LIB190-009-Q1-E1-C6
aaggatccaaaggtagcgaagtaaatagacgtttgaaaggcgtccagtatgaaaggagaaacgagtgtagcactgtctagtcgtccaactcagcgaaacagcaataactgtgaaaatgcagtaaactagcagtaggacggaaagaccccataattcttgactagataggtttagggaggagagagaatcatgaagtagaggaggtggggtaagagatgaaagaccactgcatgaggataaggaatctaactgagtaaggaaaataagcttaagctagtttggctggggaagtaaagcctaagaaagagtaaattaggcaagcaaaggcatgagagaagtataatagcagaagcatgcttgaagaaaaagaaagagatttcagaaaggggaagaaaattcagctatagagaacaggtgaaggagaactcanaaagaggag

SEQ ID NO: 3844 - DNA, 397 bp, Cyanidium caldarium
  Clone ID: LIB190-009-Q1-E1-C8
gacccacgagtccagattgcgctgcaaaggagtgggctgcggtgaacctttcaactagtcttcttgtaatttgctgccatgggtctttccatctccaagttattatcgcgtttatttggaaaaaaagaaatgagaatccttatggtagggcttgatgccgcgggaaaaactaccatattatacaaactcaagctgggtgaaatcgtcacgacgatccccactattggattcaacgtggaaaccgtagaatacaaaaatatcagttttacggtgtgggacgtcggtggtcaagacaagatacgacctttgtggcgccactacttccaaaacacccaaggtatcatcttcgtagtggacagtaacgacagagagcgtttccccgaagcacgggaggagc

SEQ ID NO: 3845 - DNA, 435 bp, Cyanidium caldarium
  Clone ID: LIB190-009-Q1-E1-C9
attcacgggtcgacgcacgcgtccgaccacgagtccgcttggttcgaagctacttatgaagagttggaaagtattttatggagtgtgatgtgttcacaagatgaattatctgctcagttggcctcttatatggaaaagttgacagagttggaaaagacagaacaaagtatagttgtgggagaaggtctggaaaaattgacagatgccagacacttggtgaataaaacaaagaccaaactggatagtgttgttactagattagaaagactgcttcttctgacgagtgttccgtcagtttccaagagagaatagttgtatccatagttttgtgcaagtgggatgtttactgctctatagtgcagataaaatagaaaagctagagccgaaaaaaaaaaaaaaaaaaaaaaaaaaaaaaaaaaggaaaggaagggagag

SEQ ID NO: 3846 - DNA, 379 bp, Cyanidium caldarium
  Clone ID: LIB190-009-Q1-E1-D1
actgtctagtcgtcaaactcagcgaaacagcaataactgtgaaaatgcagtaaactagcagtaggacggaaagaccccataattcttgactagataggtttagggaggagagagaatcatgaagtagaggagttggggtaagagatgaaagaccactgcatgaggataaggaatctaactgagtaaggaaaataagcttaagctagtttggctggggaagtaaagcctaagaaagagtaaattaggcaagcaaaggcatgagagaagtataatagcagaagcatgcttgaagaaaaagaaagagatttcagaaagggaagaaaagtcagctatagagaacaggtgaaggagaactcaaaaagaggagagcaccgaacga

SEQ ID NO: 3847 - DNA, 444 bp, Cyanidium caldarium
  Clone ID: LIB190-009-Q1-E1-D10
cggtcgtagattcacgggtccacgcacgcgtccgaccacgcgtccgcccacgcgtccgcggacgcgtggggcaggtttgtcaacagtattgccaactatcgtaccagcagtcggttagttatccatgtcaaactcagatatattatccttgtcaagaatataagttgatgcaaatcgagcaatgttgccagatccctcagctgaagtgtgtacaatacacgcaatcttgtgttattcaacaaattcaacaacaacagcagcaacaacagcagcaacaacagcaacaacagcagcaacagcaacaggaagagcagcaagttcaacaggaagaacaacaagttcaacagcaagagcaacaagttcagcaattgcagtattatggatagttattttttatatttgtgattttcttgtggacgtgccaaagtagcacaaaagttgttt

SEQ ID NO: 3848 - DNA, 442 bp, Cyanidium caldarium
  Clone ID: LIB190-009-Q1-E1-D12
ttcacgggtccacgcacgcgtccgaccaatttgtacaattcttataaacgtggattccgtaccaatggagtatcttttgtatgtattttgtcgattgcattatgtcgtctcttgattatgcctttgttgggttggtcatggatacagttattattgcactttggaatattatcggatcgaacggacaatattcaattgttggtaatgatgatagaaacggcagtaccatcggcaaacaatgtggtgattatgtgtgagatggttggaacgagtgaagagcccatttcgttggcgttgttgtggcaatttatattggctcccttgtttttgacggcaaatatggcgtttttcttgtggtctttgaaatagtttaccaattcacacgttggatatattggtcatctatgtatgtttgtgtggaaaagaataaatccttgggtat

SEQ ID NO: 3849 - DNA, 357 bp, Cyanidium caldarium
  Clone ID: LIB190-009-Q1-E1-D2
ggtcgagccacgcgtccagaaaatttgtagtgaccttgtggaccatcgaaaaatatttcctcgtcaactccaaactattgattgcgattgagtagagttatagtgtgccaacttgtggacaaggtcatttgtttgaagcttcttttggcataacaaaaagctttcgtccccggatgcctttctgaaaggaagaagaaggctgaaacataggtaggtgttcactgcagctcaaagtaggaaaagtgcaaatagatctttattcatttgtttggcactactactacacatgaaatcttggagaccccaccatattcaactagagtctcactggtagtataaaattctcgttgtgttgcc

SEQ ID NO: 3850 - DNA, 456 bp, Cyanidium caldarium
  Clone ID: LIB190-009-Q1-E1-D4
acgcgtccagagaaaaggtccaaacaagagaagtcagcagtggggaaaattgggcaatgtacagggaagtatgacccagtaatgaggagtggagtaaacagaaaaggaagtaaaaggagggaatgaagggaagttatggcaaaaacacgtgccagcagcagcggtaaaacgtgtgtagcaagcgtagagcagaagaactgggtgtaaaggtcgagtagtagagtaagtgtaaaagggaaaggaaaggagagaaagaggaaagggatgaaatgcagagatctctagagaaaggcaagaaagaaaagaaaggaagacacagtaaatgaggcgagaaagcataggaagtgaaacggattaggaacccgtgtagtctatgcagtaaaagaaagaatgggttagaaaaaaaggggatccatcccaccagggggattaaaggcgcaagaaagaaacccaaag

SEQ ID NO: 3851 - DNA, 307 bp, Cyanidium caldarium
  Clone ID: LIB190-009-Q1-E1-D8
aaatgatcctagagtaaaacaacgtgaaagtgaccaaattgttaaagcaatgttggaaaagaatattccggtcgaatacgtcttgtatccagacgaaggtcatggttttgcgagaccaccgaaccgcttagactttttgggaagagcagaagtatttttatccaaatatctgggagggcgttgtgaaccctatgaaaaagttcctggaagtactgcgcgattgcctattcaagaaggtctcctttcgtagcttttatgaaaataaagtcttttggtagcacttaaaaaaaaaaaaaaaaaaaacaaa

SEQ ID NO: 3852 - DNA, 408 bp, Cyanidium caldarium
  Clone ID: LIB190-009-Q1-E1-E1
gggtcgagccacgcgtccgaggatgttcgagctgctggctttttgatgcaaaaggaattggagtattttgaaaaggcattgaagaacccaaagagaccttatttagctatcttgggaggagccaaagtatccgataaaatacaactcatccagaatttattacaaaaagtggatgaaatgattatcggaggtggcatgtgttatacttttcttcgagtattatattccatgccgattggagactccatttatgatgagcctggatcacatttggtagaaaatattatgaaagaagccaaagaaagaaatgtaaagatacattttccagtagattttgtagtagccgatcgtatggctcccgatgcacatacagagatacgtactagagaacaaggtattcctgagcat

SEQ ID NO: 3853 - DNA, 436 bp, Cyanidium caldarium
  Clone ID: LIB190-009-Q1-E1-E10
gtcgtaaattcacgggtccacgcacgcgtccgaccacgcatccgatgtggcttgcatttgtacatgtgggttgtatacaccaaaaacggtataaaagatccccaagtactttatatcccaaaggaataagacttgtatgtgtatccaaaaaagccaaagaaaaaaacgactggggtttccgaccacccgatattcctacgatggaagagagatatgcagcggaacttgcctatgtagaagaaaagtttggaccaaagagatatgaaactcccgaaaaagccgacgcattgaaaaaaagaatacttgttaatcaagagtgggcgaaacaagaacgcagtcaaggcttgaaacaatatcaagatattaaagttacgatactcggagcaactttgggaattggtgcgtttcttattccttggatatggtggttgggttc

SEQ ID NO: 3854 - DNA, 373 bp, Cyanidium caldarium
  Clone ID: LIB190-009-Q1-E1-E2
ggtccagaattaccgggtcgagccacgcgtccgaggaatatgaggaggagtggctgtctctttgcctctccaaagggactttattggagaagattcttctctacagaatatgattatacaggaggaactggaagagaatccacaggattgtcggcttccgaacaagaagccagagagaaagtaatacgtttgtatcgatatgcgctaagtagtgtcaaagatattcgcaaacactatcgtttaaatgaaagcaaagaagatatagctgcttgtattcgagatttatttgaaaggcataaacatgttcaagatcgaaagcttattgatatgttggtgttcaagggacgacaagacatagacgaagttcgcgccc

SEQ ID NO: 3855 - DNA, 306 bp, Cyanidium caldarium
  Clone ID: LIB190-009-Q1-E1-E3
ccgggtcgagccacgcgtccaggtggttggtgacgacgacaggtttcgacgtcgacgatgcctaaacaaatcaaagatatcaaggaatttctgcttttggtccgcagaaaggatgcgagagccatcacaataaagaaaaacaagaccaacacgaaattcaaagtccgttgcagcagatatttgtatactttggtagtgaaagaaaaggacaaggcgaacaagttggaacaaagtcttccaccaggtttgactttgaaaaagattgattagaaataaactctatcgttgttgttcttgtgatggatc

SEQ ID NO: 3856 - DNA, 261 bp, Cyanidium caldarium
  Clone ID: LIB190-009-Q1-E1-E4
gcgtccatgtaaattcaacatcatcaaatgccaaagggaggaaagaaagattcttcaaagaaagaagccacaagtaaacctgcagcagcagatgctacaaagacgacagaaaagtctggtccggaagccaagttgaagggaactggtgcaaagaaacaataaaaagttgactatgcatgttcctgttatgttttgtgagttctgtttgatagtttccagctattcttttggtagtgaataaagagaaaattttttatattt

SEQ ID NO: 3857 - DNA, 393 bp, Cyanidium caldarium
  Clone ID: LIB190-009-Q1-E1-E7
gggtcgacccacgcatccacccacgcgtccgcccacgcgtccgcccacgcgtccgggaagctctcttatgtggtgaacaggaagggacagaagaaagtccagtcaaagtaaaactagtaaaacctcctctttatgttgttacaaccagctgtcttgataagaaacaaggcatcgaaatcttacaacgagcagtagaagccataaagaccaagattttagagaagaatggcaaatttaccatcaaagaagagccacgagctatcagcgatagagatgacagactgttgtctcgattaatggatgaattagaagcagagaatcgtgaagtaagtggtgatgaagatgaaagtgacgaggaacaagacgaagaaatgatggaagaggaagaagaat

SEQ ID NO: 3858 - DNA, 372 bp, Cyanidium caldarium
  Clone ID: LIB190-009-Q1-E1-E9
cgcgtccgagaaatggatggaatcgactcgaaaatggcctataaatagcgtgatcatttcccctttttgtttgtttatcgtttgtcaaagtttggttgttttcttggtagcagttgtacattcaacatcatcaaatgccaaagggaggaaagaaagattcttcaaagaaagaagccacaagtaaacctgcagcagcagatgctacaaagacgacagaaaagtctggtccggaagccaagttgaagggaactggtgcaaataaacaataaaaagttgactatgcatgtgcagtcctgttatgttttgtgagttctgtttgatagtttccagctattcttttggtagtgaataaagagaaaattttttatattt

SEQ ID NO: 3859 - DNA, 407 bp, Cyanidium caldarium
  Clone ID: LIB190-009-Q1-E1-F1
cgggtcgagccacgcgtccgaggcagttgggcgtcgctttttgtttattagccatatgcgttgtttcaacaatacaagcacaaggctctagtactcttgctccaacaggagttagttctattcctactagtgctgttacaggcgctacgggaataccaactagtttccctagttcggtttccacgggaataccaaccagtgtaccaacaacatcatcttcgattactatccttactgtcttgcaagacaaccactttgacgatacagtacaagctataaatgcggcaggacttgactctttgtttaacaatccttccgctactcttactttctttgcagcaaatgactctgtatggtctacttctacagcttctcaagctctgagtgctcttccaaccagtgcacca

SEQ ID NO: 3860 - DNA, 369 bp, Cyanidium caldarium
  Clone ID: LIB190-009-Q1-E1-F2
gcgtccacccaagcgtccgcccacgcgtccgcccacgcgtccgagaaagaggcaaatacgggaaagcagtaaaagaagaaagagaaaggaaaaaactgagtatcaggaagaaaagagggagtagatgaggaaagaaagatcaaggaagtaagagtaagagaaggagtaatgtgaatgaaagcaggaaagtatttgaagaagagagtgtaaagcgcgtaccttttgcataatgtcccagcgagtgaaagaggaagcaaaaagaaagaaaaagaagtagccaggtaagacccgaagctagttgatcttatgctgtccaagcgaagtaaggctgaaccagtatctgtggaaaaagatttggaagagatggca

SEQ ID NO: 3861 - DNA, 404 bp, Cyanidium caldarium
  Clone ID: LIB190-009-Q1-E1-F3
gtccagaattaccgggtcgagccacgcgtccagaaatattcggcagcagattgtctattggatccttctcgagttggactatcttccaagtcgctagtagatgaaattatcgatgttatcgaaggttgttattctagtctgcatagagaactgtattcttccatatgtttttccggtggtacgtcgaacctaacaggtcttttggaatatttgacggtagcacttggtagaagaatgcataaagttaagttgcttggttcgaatgtagaagcagaacgacgatttgctgcatggactggtggttctatgttagctacttttggagagtttcagaagatgtggctttcaaaagctgaatatgaagagaacgggaaaacttttattcataagaaatgtgcctagat

SEQ ID NO: 3862 - DNA, 394 bp, Cyanidium caldarium
  Clone ID: LIB190-009-Q1-E1-F4
ggtcgagccacgcgtccattgaaaataaatatcaacatatcgttctttgaggttcgtaataaacgactttagtaagttttgtcgctcacgacaaattctttcaaagtcgttcttttgacaacaaactaacttgaaactgcgcttgtgaataagcttccaaggtacctttggtttccgcaacggcggaagcaataaaaaggctttctttctcaccgccattataacgccaccttttggagaatttctgaaacattccaacccgcagaacaaccttcagtgtcgaatgccagaggatacattagaagacttctacttcagttatcatcatttttcgagaatcaatttgcaaaaacttgtaataactgcaggcaaagcaacagtaaatggtcatgac

SEQ ID NO: 3863 - DNA, 442 bp, Cyanidium caldarium
  Clone ID: LIB190-009-Q1-E1-F9
ttcacgggtccacccacgcgtccgaatttgagctctttgggaagcatgacgtctatttgggaggcatccaaacaactcctttatcattacaaaaacacagttccttaccacttaaaggttatcgacgcttttctcttgtatgtcttttctactgctgccatccagtttgtttacgtcttgttcgttgggacctttcctttcaacgctttcttggcgggtttcttctcgtgtgctggagtttttgtgttgacagtggccttgcgcatgcaagtgaatccgcggaatcagaacgcagccaatcgatgggaaaaagtgaacccctaccgtgcttatgtagaatggctgttttgtaacttgattttgcatattgctgtaatcaactttattggatgagagaatagtacgcgacgatataaagttatgacgatggacgctacactgt

SEQ ID NO: 3864 - DNA, 350 bp, Cyanidium caldarium
  Clone ID: LIB190-009-Q1-E1-G1
gggtcgagccacgcgtccgagaagagcgtgcgtggaggatggatccggttatgcactaatttgggaaaaacttgttttatcagcaacagatactgccaacgcgcgttcggtcatagtaatgaaagacgatgtggacaagatattggagctggatagtcataagaccttagctatgggtggggagccaggtgactttgtgcagttcacggagtatatacaaaagaatcttcacctttacgaattccaaacgggattgcaactaagtactcacgcagttgctaacttcatccgtgggggaattggctagattgatacggggaagccccgtattaaccaaactacttttgggg

SEQ ID NO: 3865 - DNA, 428 bp, Cyanidium caldarium
  Clone ID: LIB190-009-Q1-E1-G10
ggtcgaccggacgcgtccgaggacttgtgcgtacggtgtgtgtgtgtgtgtgtgtgtgtgtaacaactatcagcaccacaaaaagatggttcgtatgagtgtattagccgatgctttgaaatccatcgccaatgcagaaagaagaggaaagcgtcaagttctcatccgcccgagctccaaagtcatcatacgcttcttgcaggttatgcaaaaacacggatatattggagagtttgaatatgtggacgatcatcgctcgggcaaactcgtcgttcacttgataggcagattgaacaagtgcggtgtgatatcaccacgatatgacatgaaagtgcacgaagtagagcaatggatcaataacttgcttccaagtcgacaattcgggttcgtagttttgacaacatcgtatggtattatggaccacgaag

SEQ ID NO: 3866 - DNA, 406 bp, Cyanidium caldarium
  Clone ID: LIB190-009-Q1-E1-G12
gtcgaccgacgcgtccgaaggtaacaaagtaaagaaagaaggaaaaggagaagaagagagggtaggcttagaagcagcaaaccagagaggaaagcgttaaagcatgaaagaaaagaaatccgaaaaagaagagaaaaaggtaagaaagaggaccgaatcagggtaagaggtagaggagcaagaagagaagagagaatgctgggtggagtagcgaaacaagagaagggaagtaaaaggtaagaaagaggaaaggtttacgagagaaggaagtagaaagaagagagtgtaaggcggcgtcataatagaaatccgaaaggagtagaagaaaagagagagaagaaagaaaagaagagaaaagccgtactgaagaccgacacaggtactcgaggagaaaggagacccaaat

SEQ ID NO: 3867 - DNA, 390 bp, Cyanidium caldarium
  Clone ID: LIB190-009-Q1-E1-G2
cgggtcgagccacgcgtccacggaagcgtggggagcatggtacgagaagctttattgcagtcggaaggcgctcggttgattcaacaaatttatcggttgcttcaacaaaccaaacgagtgcaccgagttcctgaagagttgattctggatacggtaagatagatgatcctattttctgatggatatgtatacatatatactgctttttcgtgtttttgttgtatagatattagaaaaacatttttcacctgcagaatctcgcagacagttggaagtagcgataggtaggaaagtgagtatgatatatttgtaatatactcagaataggagatagaatggggaagatatgcggaactctttggctatgatgcaccgagtggcgaactgttt

SEQ ID NO: 3868 - DNA, 335 bp, Cyanidium caldarium
  Clone ID: LIB190-009-Q1-E1-G3
gggtcgagccacgcgtccgaccacgcgtccgggcgaaaacaccccgacataagtccgtggacaaactttaaggcttgctttactggttttggaacagctttggcactttttaccggttatgttgttttagaacaggcttattactatttttacaagcctacacagacgcaagtccccgagacgaaatcggaagaacttggctcctgagtttcgtgttcttgtaaagttggaacctcacgtctatccctacatggtgtcaaagacaggccactgataaggctaaggttttgtcttcgttccttgggccaaagtaataaagagtgttatgttttctc

SEQ ID NO: 3869 - DNA, 438 bp, Cyanidium caldarium
  unsure at all n locations
  Clone ID: LIB190-009-Q1-E1-G9
ttcacgggtcgaccgacgcgtccgcaactatccaaaggacgagatgagttgggacaacgatggacagcgcctttggacaggcaaagactttatagaatatgtcaagttgagatggggaaatcctttatttcgtagaaattgctgttggtatagtacaggcagtatagtatcttgtgacactggaaaggttttacagagttgggtttcgtgtgagttgttgagatcaatagtacgattatttaggtcgttgcactgcttgaagggttagaattaggaatggtgaagagtatatcccaaccatctagtaatcaagcaacagtagaagctctagtttcctcgaaaaaactgtattttctcaaggatccagtaacaggaaagtattggaccgaacgagattccanacgagtaaatccaatgttttatcctcagcaagataca

SEQ ID NO: 3870 - DNA, 349 bp, Cyanidium caldarium
  Clone ID: LIB190-009-Q1-E1-H1
gggtcgagccacgcgtccagggaatcattccaccaggggagtaaaggcgcaagaaagaaacccaaagcaattgacgggaatcggaaaaaggggtggatcacgtaaattaatccgataaaccgagaaccttacctctccaagaaggtgttgcacggctgtcgaaagaacgtgctgtgaagtgagagaacgtacgagaaagccaagtgaggaaaagaaggcaagtagagggcggcccgtagagcagaagaactgggtgtaaaggtcgagtagtagagtaagtgtaaaagggaaaggaaaggagagaaagaggaaagggatgaaatgcagagatctctagagaaaggcaaaa

SEQ ID NO: 3871 - DNA, 396 bp, Cyanidium caldarium
  Clone ID: LIB190-009-Q1-E1-H2
gggtcgagccacgcgtccgcaaggaagaacagatggaagccacaatagaattggtggtaaaaagtaacctttctaaccaaatgagactttttgaatggaaagctgaacaagttgttgtggcagtagaattaccacaaaggcctttgcaagtcaaagtcaagtcatgcaacggaggaaagtggaaatggtccaaagaacaaagttggtttttttgggagttgaagaaagcttcttcagatagagaatataaattgaatgcagatattgtatttgatgctcctttggacacaagaaaaacactgtatagtgtgatagatgtccattttgttattcctgatgaaaccttgacaggatttagtatattaagtttgttggtgaaggagccaaaattggact

SEQ ID NO: 3872 - DNA, 399 bp, Cyanidium caldarium
  Clone ID: LIB190-009-Q1-E1-H3
gggtcgagccacgcgtccgattcaagtgttgcaactagaaaacaccctagcaagttgttcaagttggcactctcgtccatggcggcaaacggaaagattcgggtgaaaaaccctgtcgtcgaactggatggggatgaaatgacccgcatcatatggtcattcattaagaacaagctcattctcccatatctagacatcgacttgaaatattatgatctagggttaccaaacagagacaaaaccaacgatcaagtgacgatagacgctgcacacgctatccagcggtacaacgtcggtgtcaattgtgcgaccataacgcctgatgagcagcgagtaaaagagtttaatctgaaaaagatgtacaaatctccgaacgcaacgattcgtggaatcttgaac

SEQ ID NO: 3873 - DNA, 438 bp, Cyanidium caldarium
  Clone ID: LIB190-009-Q1-E1-H9
attcacgggtcgacgacgcgtccgaccacgagtccgggacagcaaccacaaggagcagcagcagatgatgatgcaatgtatcccgattatcatttatgtatatacattgcagagtttcaaaaagcctatgaacgagtcgaagcactgggtttgctgtacaatgaccacatattttccgataaagtttatagttatcaagatgcgttggtgcacaatcagtttcgattgcgagatattcttgatttggaagcacatggtaagtggtggtggataatggagtagaagagattgagtgtgtgtaaaagctcgtggacaacgccgcgtgttgtatcgattgcaattggaaacgcggagtttatatcatccgttttttatgcggccattggtgaatcccatgggccaagtaagaatttattgttttcaataatccaataaaaa

SEQ ID NO: 3874 - DNA, 376 bp, Cyanidium caldarium
  Clone ID: LIB190-010-Q1-E1-A2
cgggtcgagccacgcgtccacggaagcgtgggcggacgcgttggccaaccagggatctcggggccggtacctgtttgcgtgacgaattcccctatcaagagtcgtaaactcagtccagttaaatatggaaggctcagaatcaaattcaacgtcaaattcgaatatccgcacacgttaagattaccatgacatccattgagcatcacatttcttttacaaatgcatcaaactctagctcatttacctgcttatttcgaaaacctattacacttaattcgagataggtacaaactgacgttcatcatatgttaccattctaacttgaaatacacagctttaacggcaggtatacaagcagtagcaaaatacaattcct

SEQ ID NO: 3875 - DNA, 333 bp, Cyanidium caldarium
  Clone ID: LIB190-010-Q1-E1-A5
aattacgatatccaatgaaggaacagcaaagagaaagtcgctacgagtatacaaaatatccaataaaagttccaagaggagctcctcttagaccaacgtttcagctccttgttacctttttgaacattctctaaactatataaggcatcatgatatagagattcgatttcttcagcctgttctgataactttgtggataaaacctgattcagtgcagctatttcaacagcctgtttttctacagtcttgacttgctcaagtgtctccatgagttccactaacaaggtctcattctctccttccaataaaagctgcttccggtcttggctttcc

SEQ ID NO: 3876 - DNA, 368 bp, Cyanidium caldarium
  Clone ID: LIB190-010-Q1-E1-C1
cgggtcgagccacgcgtccgcgagtcggttggtaagttatgtagccaagactggttttgaaggcaccgtggaagtagaggcgatgaacgctttacaagtgggacaaattgagaaaacctatgaaggcctaactagtttacagcgtgaattggatagtgctcttgctagtcagtattatttgagaactcgtttgatgcggcatgaacaaacggtgatggctacgaatagagcagttttggtatttctgttgctcaaaacgctgtttgttgcttgtctagttgctgtcaaattgtattttgtgaagcgtttgtttgacgatccgaaacgcgtacgcatgagagtataataaagccattgttgttttggtt

SEQ ID NO: 3877 - DNA, 304 bp, Cyanidium caldarium
  Clone ID: LIB190-010-Q1-E1-C2
acggacgcgtgggaaatttcaatggaggagttgcgagctcagttaccaagatatcaaagacagatgatatcgtcgtcgtcgtaattcgtatctatgctttaagttttcatctttttgctaacacgttggttgagttgtagaaagcatttgataaatttcccgcgaggaatcctacttgggacgtgtcctccaatgctgcagagagctattcggtatgtctgtttattgcttgttttcataagagagagagagttggacatcgaataaagaaaaaaccacacaaagtggaacaacataaacaaaa

SEQ ID NO: 3878 - DNA, 398 bp, Cyanidium caldarium
  Clone ID: LIB190-010-Q1-E1-C3
acgcgtccgattgaacttggagcttttacaacctgctctactcaatatcgatccatcattcaacactacaaagctgctgtatgacaacgacgatggtttccggcaacaactgcagccaaccacagcaagttgccactttttgtctcctcgaaagagaaaactacttcatgcatgtgcaaaaggaaacattgatacagttagggatctgattcaagacgaaaaagtctcacccaacttttacaactatgacaagagaacgccactacatttagcagcagctgaaggacacttggaaattgcacaaatcttggtagaagctggagcgtctttaactacttatgatagatggggatgcacacctctcttcgacgctgttcatgggaaacatcaaagactga

SEQ ID NO: 3879 - DNA, 372 bp, Cyanidium caldarium
  Clone ID: LIB190-010-Q1-E1-C5
ttcccgggccgacccacgcgtcaggaaagaggataggggagtacatagatgaggagtgtaggaaggagatagaagaggaatggagaagatgggagaggataaagcagagtagagaagaggagggagtagaagaggagttgaagttatggaaggaagagaataaggagaggatagaaagaatgaataaaagaatggaagagtacttaaggaggaggatacaggagagaatgaggaagtacttggagcagatagaaaaggtagataggagtatagagttagaggaagagagagtaggagagtggaagatgagtgaggaggagatagaagaaggcatagaaggaaaattgggcaatgtacagggaagtatgaccc

SEQ ID NO: 3880 - DNA, 414 bp, Cyanidium caldarium
  Clone ID: LIB190-010-Q1-E1-C8
ggtactagtcaggaattcccgggccgacccacgcgtcagcggacgcgtgggcggacgcgtggggctttactttatttgcgttgttgcttttggtccgtacggtggcagtgttccaggtgcctttaagcaatgcttgattctagtgcagttttccgataacggagtatgaagcttagtatgcatatgtttccagacactgagtatcttgaagtcttctgcttaagttgaaaccaagttaagaaacgtctttaagttttcctattcttgattgttcttattagccctacaagctgtttagaaattaagagaagcttagcttgagggaaaagcattctgatgcgacggttctgaagccttggcgaaggaaagacatcgccttccccttacaagacactacctaaatgcaacagaact

SEQ ID NO: 3881 - DNA, 428 bp, Cyanidium caldarium
  Clone ID: LIB190-010-Q1-E1-D1
ggtcaagaattaccgggtcgagccacgcgtccgcaaacttcagagtatagagaactcggtgaaagtggtattttagtcagtcctcttgggtttggggcctccccattaggtggagtgtttggtcctgtgagtgaagaagaaggtattagagctgtacataaggcgtggaaagagggcatcaacttttttgactgttcgccctattacggctttacaaaagcagagaaagtattgggtctgggtttgaaggaccttcccagagagtccatagtggttgctacgaaagtaggaagatatggaccttcagaatttgacttttcagcaagcagaatcgagcgcagtgtgaaagagagcatggaacggttgaacgttagctatttagacgtcgttcagtgccacgacattgagtttggcgatctgaatcaaat

SEQ ID NO: 3882 - DNA, 410 bp, Cyanidium caldarium
  Clone ID: LIB190-010-Q1-E1-D12
aagatgaggtatagagaatggcggtcctaactgtaaggatccaaaggtagcgaagtaaatagacgtttgaaaggcgtccagtatgaaaggagaaacgagtgtagcactgtctagtcgtccaactcagcgaaacagcaataactgtgaaaatgcagtaaactagcagtaggacggaaagaccccataattcttgactagataggtttagggaggagagagaatcatgaagtagaggaggtggggtaagagatgaaagaccactgcatgaggataaggaatctaactgagtaaggaaaataagcttaagctagtttggctggggaagtaaagcctaagaaagagtaaattaggcaagcaaaggcatgagagaagtataatagcagaagcatgcttgaagaaaaagaaagaga

SEQ ID NO: 3883 - DNA, 409 bp, Cyanidium caldarium
  Clone ID: LIB190-010-Q1-E1-D2
gggccgacccacgcgtccaggttgtttgaccattggacaatccattatctttgtgcacacacgcgcaagtgccaacgaattgaccaagagacttcgagaggaaggccatactgtatctttgttacacggaggagatatgtcacctgaagaacgggatcgcgtgattgacgagtttcgacgtggaactacgaaagtattggtaacgaccaatgtattggcacggggagtagatgtattacaagttaccgtagttgtcaattatgatttgccactagatgtgaacaatcaacctgatccagagacttacttacatcgagtaggaagaactggaagatttggtagaaagggtcttgctatcaattttgtgtatgatcgatacagtttgaagcagttgcaggacattgaaaaa

SEQ ID NO: 3884 - DNA, 281 bp, Cyanidium caldarium
  Clone ID: LIB190-010-Q1-E1-D4
cacgcgtccacccaagcgtccggtgggtattgcgactcatggccatgctgttggtaatgtgtgtctatagaagaagtctattgtgggaaattcgaggaatgcttttttaaaaaaaaaagaaaaaaaaaaaaaaaaaaaaaaaaaaaaaaaaaaaaaaaaaaaaaaaaaaaaaaaaaaaaaaaaaaaaaaaaaaaaaaaaaaggggggccgcccaaaaggatcaaaacttacgtacacgtgaaagcaaagtcaaaacccttcaaaagtgtcaccaaaattaa

SEQ ID NO: 3885 - DNA, 402 bp, Cyanidium caldarium
  Clone ID: LIB190-010-Q1-E1-D5
ttcccgggccgacccacgcgtcagcgtacattgtccagtttgctttttctgttgtagtcattgctatgttctcccaagttaccttttatctataccgtgactttaagtgtgctttcgatgggcattgggattacgccacgcatagcgaagtgtctggtcctgtgggttattgccgttacttcattgctttggggagcatttccatcgtacttttagctattgttgccgtagctacttttggaacgctgtattttgaagttcctatggactatatcttttatggtgaatgggggatcaacgcttttctgtttctgtggtggattatcggtgcttctctcattactgctaaaagaccttcggatgagttgatgcaaatgttgaacaacttgcgtgaagttgttg

SEQ ID NO: 3886 - DNA, 389 bp, Cyanidium caldarium
  Clone ID: LIB190-010-Q1-E1-D6
ggtactagtctagaattcccgggccgacccacgcgtcagggacgttattttggtgttggtaggaaataaaaccgaccaaaccgaacgtagacaagtaagtacggaagaaggagaagccaaggcaaaggaatatggaattatgtttatggaaacgagtgcaaaagctggtttcaacgtcaaagcattgtttcgaaagattgcttctgtattgccaggaatggaaaacgtaccagagcctacaaatatgcaaatggtggatatcaaactcaactccaacacagaaacgacgacgactagcgagtcgaatcagacgcaacgatgtcgttgttagagcgagattggatggtgtacaagtaaaagttttcagagtcttggttttccacggaatg

SEQ ID NO: 3887 - DNA, 406 bp, Cyanidium caldarium
  Clone ID: LIB190-010-Q1-E1-D7
ggtaccagtctagaattcccgggccgacccacgcgtcagcagaaatacaagaagaaagcctatagaggcgacaagaccatgacgcaaactttttggaaatcgctgcacaacagcaacgataaaggcggaagacaaacaaggcgcaacaactacaagagctattcctactattagggttaatgtcatagtgtcgcgataaccctcgaatggttcagaaggaaactgatcaataatatttgccaagtacgcgtttaaacctgcagctggtgccagtgtaaggggaagattggtaaagagtccgattaggatagagccagctgctcctgtgatagctgtcgcaactgctacttcaaaactcggtacggaagcttttgtggagaataattgagagttgagaagttaaaca

SEQ ID NO: 3888 - DNA, 223 bp, Cyanidium caldarium
  Clone ID: LIB190-010-Q1-E1-D9
accacgcgtccgcccacgcgtccggaaggttttcgttattggaacgactgattcgtcagctgggagtgactatggacacattatctgaactttccgattccaacaaggaaaagaaatggagcttacatgattatgttatttgagaagatatatgttttgtaaacgaacaagaagctctttctacttgtaaatatcgagttattcgatgaatatttttgaaaaa

SEQ ID NO: 3889 - DNA, 385 bp, Cyanidium caldarium
  Clone ID: LIB190-010-Q1-E1-E4
gacccacgcgtccacccacgcgtccgcccacgcgtccgcggacgcgtgggcggacgcgtgggcacttgttgaggtagttaagcacaatttgggttgttgtttcaagcttgtcttaaacccgtgggagtaaaaacgacgaaattgaagcaagctagaacctttaccatacaatggaatcaactcagtgaatgcaagcacaagaatatgcgaagattactctgttttacttgccttggtcagtcatcgttatccgacaactatggttattttgagcaaggtacgatgcagagcctcgtggaaatttgtttaaaaatcaaatccgtgtagaacacaattattttcagcaagtgccgaccaagtggaaggaattgggaaaggatgttca

SEQ ID NO: 3890 - DNA, 281 bp, Cyanidium caldarium
  Clone ID: LIB190-010-Q1-E1-E8
ggtacaggtccagaattcccgggccgacccacgcgtcagcccacgcgtccgcccacgcgtccgcccacgcgtccgcccacgcgtccgcccacgcgtccggagatgtattgcagtaactacaagtttatcggcagatcatttccaatcggtgagtcctgatgtgatcaaagaacatccgggagtcattacgattgccgatattttggggtttgagaatttacagggatcttgtaatgacgacgacgacgaggacgaaaaacaacaataaatgggttgcgggt

SEQ ID NO: 3891 - DNA, 394 bp, Cyanidium caldarium
  unsure at all n locations
  Clone ID: LIB190-010-Q1-E1-F4
cgggccgacccacgcgtccacggacgcgtgggaagaagacgagtcaatggaaagcaaatcggtggaccaaaaaggcaatgcaatggaacaagtagaaatggaggatactcatcaagtttcagacactgttgttgctcatggagaggcgtcggatacccagttggnaatgggacgatcaactctacccgaaaaacaacaacaacaactaccaccgccaatcgaggaacaagaaacgcgaaataatctaggcgaacagtcagagtcaactagttgcatcggtgagagcacagaaagctgtaatatagcaccaaaagctgacactataagcctcccaaacctccgtagcgatgcaacttttattaagaacatcgctcagaaattgtgcactgttaat

SEQ ID NO: 3892 - DNA, 407 bp, Cyanidium caldarium
  unsure at all n locations
  Clone ID: LIB190-010-Q1-E1-F7
ggtaccagtctagaattcccgggccgacccacgcgtccacattatgtattattcgagtgttatctttacacaaacgggagtctctacaaaagatgctatattggcaagtcttggtgcaggaatattaaactttttatttgctcttccagccattccaacgatcgaccgatggggcagacgtcctttgttgctatggacattcccactcatgagcatctttttattattttctggcttttccttttgggcttcgtctagtcatactcgtttgggattggttgctgctggtatttatctgtttatgattgtttattctccaggagaaggacctgttccatttacttattctagtgaagtatttcccctttatattcgtacttggggaatgagctnttgcaccgcaacta

SEQ ID NO: 3893 - DNA, 304 bp, Cyanidium caldarium
  Clone ID: LIB190-010-Q1-E1-G11
aagaggcaaatacgggaaagcagtaaaagaagaaagagaaaggaaaaaactgagtatcaggaagaaaagagggagtagatgaggaaagaaagatcaaggaagtaagagtaagagaaggagtaatgtgaatgaaagcaggaaagtatttgaagaagagagtgtaaagcgcgtaccttttgcataatgtcccagcgagtgaaagaggaagcaaaatataaaaaaaaaaaaaaaaaaaaaagaaaaaaaataaaaaaaaaaacgaaaaaaaaaaaacaaaaataaaaaaaaacaaaaaaaaaacaac

SEQ ID NO: 3894 - DNA, 289 bp, Cyanidium caldarium
  Clone ID: LIB190-010-Q1-E1-G2
aagcaagaaagtatttgaagaatagagtgtaaaacgcgtaacttttgcataatgtctcaaccaattaaagaaggagccaaaagaaagaaaaagaagtatccaagtaagaccccaaactaattgatcctaagctgttcaaaccaagttaaggtgaaccaataactgtggaaaaagattttggaaaaattgcataaagggtgaaaggccaatcaaaactaattataactggtactcctccaaagctaaataactaacgtatgcaagaaagaagaaagtaaaagaatagaaa

SEQ ID NO: 3895 - DNA, 374 bp, Cyanidium caldarium
  Clone ID: LIB190-010-Q1-E1-G4
gggccgacccacgcgtccacccaagcgtccgcggacgcgtgggttgtcaaggaaaaaattacttgaaacccggagaaaaacaattggggactgggaacaatccaaaacatttggaaaaccccgttaaattggccaattaaaattggaattgcattcccaaaccaattggcatttaagggaggtcctaagggggccaagctacattgggcggggccctatttactccagaactttattcttgtggagtagatattgttggcccttccaacttgaaaacattattagatagtgttcctgattattggaagccgatgaagaaagaattactgttgagaattggtcccgtagacaccgacgaagaattcaatcaaaag

SEQ ID NO: 3896 - DNA, 326 bp, Cyanidium caldarium
  Clone ID: LIB190-010-Q1-E1-G6
ttcccgggccgacccacgcgtcagcagtttactgcaatgtttcgacgcaaagcttttcttcattggtatacaggagaaggaatggacgagatggagtttacagaagcagaaagcaatatgaacgatttggtttcagaatatcaacaataccaagaggctactgctgaagacgggcttgacgtggattttgaagaagaagcgttttaagctttgtgtcaatacacacaattccttggatatcgcctcgacctttcatttgcaaactattcagaataccgtgactatttctccgcaattcagtgatggataaagaaagatgtttttag

SEQ ID NO: 3897 - DNA, 400 bp, Cyanidium caldarium
  Clone ID: LIB190-010-Q1-E1-H10
attcacgggtcgacgcacgcgtccgggattgaccaagtgtgagaagcaaagtcaatggaaaaggaagaggaaaggcgaaaaaagtagcgaataaatctagagtagaaagctgtgagaggaaagaggtgtatgatgcaggcaaagaagtgacgcagtagatcagagagtaacacatgcaagtaggtaaagcgaacgggtgagtaaagaggtgtgaaagagtggaagaacatgaaagcacagaagaaagatcaaggaagtaagagtaagagaaggagtaatgtgaatgaaagcaggaaagtatttgaagaagagagtgtaaagcgcgtaccttttgcataatgtcccagcgagtgaaagaggaagcaaaaagaaagaaaaagaagtagccaggtaagacccg

SEQ ID NO: 3898 - DNA, 449 bp, Cyanidium caldarium
  Clone ID: LIB190-010-Q1-E1-H5
gtacaggtctagaattcccgggccgacccacgcgtccacccacgcgtccgcaaccgtttttcgcagctccaaccagcagcatcagtcagcctacagtcgttttcaacgggccacttttgactgcagcaccaactttcagtccttttacaactgctgttcctagtttcagttcaggagctgtttccagtggattcccatcattctctcccgttccaaccagtaccttttcaagtgacgtgaatggaaatactctttccacattttcttcgtttccggcaccaacttcaactataccgatacaaacaactatctttttctaagcaggtagaacaagaagttcgatgagaatcacaacagtgtctgatatatagaaaagattggattgtgtttgatgacacaaaatatcatcgtgcaaagtcaaaggactttaaaaagttgcctttaatttg

SEQ ID NO: 3899 - DNA, 429 bp, Cyanidium caldarium
  Clone ID: LIB190-011-Q1-E1-A2
gtccacgcacgcgtccgaagctcttccttatattctttgtgcttggacaatggttgcaaagactgctctgagttgcctctttctctctttccttatcgctgccgcagttgcagccgacgtagtttcagatgacagatggggatatgctcagcaaactcaacaacagcaacagtgccaacaagtatgtaaacagtatgcatactatcagagtccagtctgcacttccgtaaccacacagagcccatactggacccaatgctcgaagactgtgcaaacctttgtcccaagccagtgcagtacttatacccaatctcctacatggacctattgcagcacctacaccaccactagcgtaccatctcaatgcagcaaggccgtgactacctatactcaaacctgctgtgcttatgcccaacaaacttcctatgc

SEQ ID NO: 3900 - DNA, 360 bp, Cyanidium caldarium
  Clone ID: LIB190-011-Q1-E1-B3
gtcgaccgacgcgtccgcggacgcatgggggttgttgtggttgcgagatggtgtacagtcgtttgtccttgtcttttaacgtcacatttacttttcaaagtaacgttgcttcaaattttgaagcaaagtttagttgtaaaacaagaaaaacctttataggggaagggtttttacatgttggccctcttttcaaacagaggagctttctttaccaatgcaagcagattccacgttgtgaacttgttgcgtctttacaaaacgacgagagtacaaaagatgaagaatcgtcaagttttcactgggctaagatttttattcctgacagtatgaaaattgacaacaaatatgccaacgtgtggt

SEQ ID NO: 3901 - DNA, 163 bp, Cyanidium caldarium
  Clone ID: LIB190-011-Q1-E1-B5
tcccgggtccacccacgacgtccgaacacgcgtccgataatgcaaatatagggcggcccgataaacgagatggcgtacgacgtgatacacactttgcacaatatcgaccatatctaaattcgatgtaaaagctacattcaacgactagaatatgttcagaatt

SEQ ID NO: 3902 - DNA, 456 bp, Cyanidium caldarium
  Clone ID: LIB190-011-Q1-E1-B6
gtcctacattcccgggtccacccacgcgtccgaaccacgttggtaaagatagacttgtctcaaggcagctttaaagtactccaagactgtgacagagatttagaatgtgatcataataccaagtttcagttggaacttattcagtatggtctcttttcacctggtttttggacgagagaaaatgttctgctcttctatttggagctcgtgtcaggtgtattcataagggacactctccaccttttctacaacaaaggtgaagaacatctgtttgcgagtttaacgctgttgttggagacacaagtttcactggatgcagacataaaagcaaactgggagaaacgacactttatcgtttgcctcaacgtcatgtctttgtgtgacgaatatcaacgacagtattcaaaactatgttcacccaaatgaaagcacgattcatatgccaccaattaacag

SEQ ID NO: 3903 - DNA, 378 bp, Cyanidium caldarium
  Clone ID: LIB190-011-Q1-E1-B9
cgattcggagagaaaagaactgttatcagtgatgagagaaaatgcaacagaacgactgcagctggctagaattcagggagcttacgttccacccgccagaatgccgatttccctgtccttgaactatctacatccgaacccgtttggaaaggattcacgatatgaggaatttcaaccagaaaaagaaaaggtgaagtttgatcctggtaatacaaggagaggtggtatcatggaagccatgttggggggaaaagataaaatgagaaatgggattaccagtagaaaaggttctcctggctctactatgggctccaacacgaaagctattaaaccgggaaaattacaataaaaaagtagcaactataggattaaaacaaa

SEQ ID NO: 3904 - DNA, 422 bp, Cyanidium caldarium
  Clone ID: LIB190-011-Q1-E1-C1
gtcgaccgacgcgtccgcacacgcatccgtccttgtagaaaactatgaagtctttcggaattgctattgttttcctaagctttgttattgcatcttatgcagcagttgtatccgaaatggcatccaatgagtttcaaagaggaggatacgctccttctccttccaaggaatgctgcatgaccacttgtcaatatgcagaactttgcccaatttctcaaccaacttatagccaagctccatcttacattccatctcctacctatggccaagctccttcctacaatcaatattcttcttcgtacggttcctctagctatcgtctcttaactgcagacgaaaaccaacttgtgagcagaggaggttatgcaccaacaagccaatgtattctagttcctatccaatgctgcactgattgcaaacaa

SEQ ID NO: 3905 - DNA, 313 bp, Cyanidium caldarium
  Clone ID: LIB190-011-Q1-E1-C12
tcgacccacgacgtccgaaacaaaatacgccggtgtttgatgttcctctggcctgactatctttggcgaataagctttgataggattttcgggtgagtttggtataagtgattgtggcttttttttgtgttttgtgttggatgtcgaataaaaaaaaaaggagtgagaatgaacaataaaaaaaaaatataaggaaaaaaaaaaaaaagaaaataaaaaaaaagacgggaaatgaaacaaaatcctcataacaaaaacaagaagtaaaagaaaaaaaacaaacagtaaatttcgcttaaaaagtatgttggtt

SEQ ID NO: 3906 - DNA, 342 bp, Cyanidium caldarium
  unsure at all n locations
  Clone ID: LIB190-011-Q1-E1-C2
tattactgtcgtggtttggatatttgctatggttattgtttgtggtgcctttgcaggtttgaggangaaaagttgttttccgaataggaggcgtcgcgtttctcgcgaggcgcctgcnacagaacatggagttgcttcggcaaacgataactatagttcgcctccttttgtatttatgtataatgtctacctgccacgtcttgatacaatagcgcctgaaatagtgtacggaagccaagaatcctttctgaaacaagaacgacagttgaaaaaacgctttgtgaagccttacatgtcccagccggtattcaaacaagacgaagaagaggatagtttgtccct

SEQ ID NO: 3907 - DNA, 342 bp, Cyanidium caldarium
  Clone ID: LIB190-011-Q1-E1-C5
gacgactggcgatgaaaacgacttggagaccgacatgggcacttatccatcgactttatgtaaaaaccacaagtagaattgttcatcaaccaaaactgggttttcaaacaagcccttttcaaacgtccctttttgtcctttcgtctgctgaacaagaacaaggcgggtcctcgaaaagtcgccagtctcatgcttttgcctcctttgctaccgtagcagccactgtatttggtaccatttatatgacgtgtcccattttgaaagcagacgatgagactctagagcctccaaaatacccttggaaccattctggtcctttgtcttccttcgatgccgctgcca

SEQ ID NO: 3908 - DNA, 256 bp, Cyanidium caldarium
  Clone ID: LIB190-011-Q1-E1-C7
ccgggtccacccacgacgtccgagaactcgagtccttgttgaaagaacgagatgctattttgaatggaacaagtgaagaatacttgagtcaattggcgcctttagagaatgaaaggaaacgtaaactcgatagagctatggacttttatcaacttcaactacaatatgcagaacagctgtatgagttggccaagaaagaagcatatgatagctttcaagcacacaaggcagatcattgagaacatatgtggcgtat

SEQ ID NO: 3909 - DNA, 423 bp, Cyanidium caldarium
  Clone ID: LIB190-011-Q1-E1-D1
gtccacccacgcgtccgaaccaaagcgccggtggcatttgcttgaaactttactaagaaacaacttatgagcgacagtgcttccattggagaaacaaagagtgtagccactttgttttcattgggttttaaaactgttcgaaggcctcgcgcgagagatagtgacgattgcacgctttcggaaggagagcaaccgaaaaagaggaaatgcgtcgagttgtcgagctattcaagtgatcttggtctcaatcataagaaactggataaagcgaacaacttctacaagctaaggcaatctatggatcatttctcgttttccgacgaaaacccagaggaagcgatggaagttccggcgtctcctgatagaacaccggaaaggcaaattttttccaacagagtttaaaaaacagttccccctacccct

SEQ ID NO: 3910 - DNA, 395 bp, Cyanidium caldarium
  Clone ID: LIB190-011-Q1-E1-D10
tccgggtcgacccacgacgtccgaaagcttatgagaatgccttggctttggcacttgctggtgaattggagtcttctggagttgtggttcaaagcataactcctttcttcattacgagtgaaatgagcaagatacgcaaatccagtttggcagttccttcagctgagcgatttgctcgagatagtttaaagagtgttggatatgaagtgtcttgcaatccttattggtttcatgaattccttgcactagttatttcctatttacctttgaaactacagattcgctatgtagccaagttacatcgtggccttcgtgaaaaaggattgcgaaagatgtcttctgcagaatagaagagtagaatatgatgtggtgattagtctttggagaaattttgt

SEQ ID NO: 3911 - DNA, 379 bp, Cyanidium caldarium
  Clone ID: LIB190-011-Q1-E1-D12
tcgacccacgacgtccggaatgaagggaagttatggcaaaaacacgtgccagcagcagcggtaaaacgtgtgtagcaagcgtagagcagaagaactgggtgtaaaggtcgagtagtagagtaagtgtaaaagggaaaggaaaggagagaaagaggaaagggatgaaatgcagagatctctagagaaaggcaagaaagaaaagaaaggaagacacattaaatgaggcgagaaagcataggaagtgaaacggattaggaacccgtgtagtctatgcagtaaaagaaagaatgagtaagaaaaaagggagtcattccaccaggggagtaaaggcgcaagaaagaaaccaaagcaattgacgggaatcggaaaaaagggtgga

SEQ ID NO: 3912 - DNA, 229 bp, Cyanidium caldarium
  Clone ID: LIB190-011-Q1-E1-D2
ttcacgggtccacccacgcgtccgaagacaaggaaggaattcctccagaccagcaacgtttgatatttgctggaaagcaactagaagatggtcgtactctttcagactataatattcaaaaggagtctactcttcacttggtattgcgtttgaggggtggttgctaaatatttcagcaagtagtttagtttagcccttattttctgaataaatattcgcagtttttgtc

SEQ ID NO: 3913 - DNA, 150 bp, Cyanidium caldarium
  Clone ID: LIB190-011-Q1-E1-D9
gtgagtcgtattaccaccagcattgggaaggaaacagttcgcggattattgcattgggacgattgatagaagctggacaagccggtagttaattgttcggggggagcagccagagactagtagtcaaatacacggctttgaaagcgtcac

SEQ ID NO: 3914 - DNA, 385 bp, Cyanidium caldarium
  unsure at all n locations
  Clone ID: LIB190-011-Q1-E1-E1
ggtcgacgcacgcgtccgaccacgcgtccgggtatctgcggtagaacatatgaaagaagcaacaccgactgtttagcanaaacacagcactctgcaaaaaagagaaaatgtaaagtatagagtgtgcggcctgccagatagtagagaagaaatcgatgaaagtgaaagcgagtaaaagatgaggtatanagaatggcggtcctaacggtaaggatccaaaggtagcgaagtaaataaacgtttgaaaggcgtccagtatgaaaggagattaccgtttgtggtgtttgtgtgtgtgttgggaagagagagatggataccggaaaaccttaaacttctgtacgcctaaggagtacaacccgagcaaaaaccagcgaatcaaagaaaa

SEQ ID NO: 3915 - DNA, 295 bp, Cyanidium caldarium
  unsure at all n locations
  Clone ID: LIB190-011-Q1-E1-E4
ttcaagggtccacccacgcgtccggactttggaaagcttttgtgagaaaagggatggtgaaccgaatgggtaaatttgaaaactcggacaaagtaaaaaagcaatttcctgttgcaggggaatgcaaggggccgaacacgactcttcactggaagaagaaaaatttgggactttgacagcgacgatgatgcatgttcctactgtaaaacttgtcagttgcgaagaagactggaaaaaaggctancancgaaaaagatacacaaccaaactagaaacccaacgaagaccacatacg

SEQ ID NO: 3916 - DNA, 143 bp, Cyanidium caldarium
  Clone ID: LIB190-011-Q1-E1-E8
acaacaccctatagtgagtcgtattaggagcacatacagaagagaagctttccgaggagaattttgtctgcaatagtatgaggcaagtcgtgactgacacaatagacttgcgagaaagagtagagcacacatgcacagaatgg

SEQ ID NO: 3917 - DNA, 346 bp, Cyanidium caldarium
  Clone ID: LIB190-011-Q1-E1-F10
acaaaaccctaaagtgagtcgtattaagcgctttatgaagtgcatgtcttttcagatcacacaaccacttctgcactgaatgaacgacgtatgggtactaactgtgcattttggggatcgagcaaggatgtcaaatatgttatcaactaggatttcccgaatactagacaacactatgttcatcgcattggtcgcactggtcgtgctggtgcccttggcaactcccatacctttttcactccggttaaattccgtgtagcgaacgaattagttaacttgttgcgagatcctcgacacgacattcctccccagttggctcgtttcataaaaacttcggcctttggcg

SEQ ID NO: 3918 - DNA, 268 bp, Cyanidium caldarium
  Clone ID: LIB190-011-Q1-E1-F9
cccacgagtccaaagaaggactaatgatgattactcacacaaccatttggaacaaagaggcaatttctggaatacaataccagacgaaagagacaggaaaaatctgactctcacgaagattcgagggaataaatgaggaaaaagcccatacaccaagaaaatgtctcatcataaggtcagaaggaattcgagatcaacatagggtaggcttaaaagcatctaaacatagaggaaagcgttaaagcatcactgaacagaactccgatcc

SEQ ID NO: 3919 - DNA, 231 bp, Cyanidium caldarium
  Clone ID: LIB190-011-Q1-E1-G10
aacagaaactcaaggaaggtaacgtacctcacgagttttattattatcccaaagcaggacatgcctttatgaatccacccgatggagggtttacggatgaaatgagatcgaaagtggaaatgttgcgtccttatgatgaagagagtagacaattggcgttgtccagaatgttggaatttttccgtaaaaacttgtcgtcttaaataaagtgtgtttgggtttttgtgaaaa

SEQ ID NO: 3920 - DNA, 317 bp, Cyanidium caldarium
  Clone ID: LIB190-011-Q1-E1-G9
attcccgggtcgacccacacgtccggcccgagaaaggagagggcgtaagacgtgatacagagtaggaagaaaagagaagagagctagaaaggaggtaaaagaagagtaaaaggactagaagaggtacggaattcacgaggaaggagcgtgaaggaaggaggaatcccaagtaatcgaggaagaaaaagcttcggtgaaagcgtgaacggattttgtacacactgcccgtcaagttctggaagtgtgctaggaataagcaggagaagtagaagagagtaggaaaagaagaaaggaagtgaagacgtaagacgtgaaaa

SEQ ID NO: 3921 - DNA, 304 bp, Cyanidium caldarium
  Clone ID: LIB190-011-Q1-E1-H11
ggttgagattggttttcttttcgtccacgcttcgttccgttactttttgtcgtgacaagttataatataaaatggccaaagtaaaccctgtgtcgtcggctcctaaactaagtgtaactagagagatagctatcggtattgggcttggtatagcgtgtgctatggtatttcgccagtggcatctcggatacacggaaatgataagaaaatattatcgcgagttggatgagcaagaacagagttcctcgtcgtcgtgaaaaccgccttgtgtttgtgagataacaataagtggaaccttgtttcc

SEQ ID NO: 3922 - DNA, 401 bp, Cyanidium caldarium
  Clone ID: LIB190-012-Q1-E1-A5
gggtcgacccacgcatccgcacagggaataagttgttggataaactattgtttcctgtggaacgggtggcatgttcgttgtttcgatggaataaggaggagaaggaggagatgagtagtggaaatggcaaagtgttcatggaagagaaccatgagcctgggaaaaccacgaccagtgcgttggcctatgtcaaacaatattctccgatgaaaaagaggtcctcctagtgtcgttgatcaacgaaatgtggtttcctaggtggatagatacaaagataggtataatatcgagcttttttattccttgttcggataacgatgatatcgagaccacaaaaaaaaacaccagagcaaccgcctgtatcctttttgtttcccccaacaacaacactagtcgaatat

SEQ ID NO: 3923 - DNA, 428 bp, Cyanidium caldarium
  Clone ID: LIB190-012-Q1-E1-A7
gtactagtctagaattcccgggccgacccacgcgtcaggaagagacggtgagagcaatgaaccacgtcatcgaccgtggatatgcatattattggggaactagtgagtggtcagctcaggaaattacagaggcttgtcgagtcgcggatcggaatggccttattcgtccgttgtgtgaacaaccacaatataatatattccatcgtcatcgagtagagatagaatacgaacctctttatagagagtttggtttaggtacgacgatttggtcacctttggcctggggtatattatccggaaaatacagtgggaagaatattcccgaaggttcaagattatctctggagaagtacaagtggctgaaagatactgcattttcagaaagagagtggcaaattgaaaagacggatcagttaaagccaatagct

SEQ ID NO: 3924 - DNA, 421 bp, Cyanidium caldarium
  Clone ID: LIB190-012-Q1-E1-B10
aagctcttccttatattctttgtgcttggacaatggttgcaaagactgctctgagttgcctctttctctctttccttatcgctgccgcagttgcagccgacgtagtttcagaggagagatggggatatgctcagcaaacccaacaacagcaacagtgccaacaagtatgtaaacagtatgcatactatcagagtccagtctgcacttccgtaaccacacagagcccatactggacccaatgctcgaagactgtgcaaacctttgtcccaagccagtgcagtacttatacccaatctcctacatggacctattgcagcacctacaccaccactagcgtaccatctcaatgcagcaaggccgtgactacctatactcaaacctgctgtgcttatgcccaacaaacttcctatgcagtcagtac

SEQ ID NO: 3925 - DNA, 466 bp, Cyanidium caldarium
  Clone ID: LIB190-012-Q1-E1-B11
ggtataggtccagaagtcccgggtcgacccacgagtccggcgttgtggtagtggacaacttggctttattgctggaacctttacttgttattcactccattgtggcaatattcttcacagaacgaatagtttctgcccttttcgcagttctttttccaaggttcacacaccattttgtgctagttttcgtcatcaaggaatgtgcaaggcctcgctctcctcaagtcctttttctgactcagcagagccagatcacgagttgacagcaaatgaacatctcaacttgcattggatgggtattttagctacttttttggttatgttgccagaaactgccgatgcttcttcgttggacaccttgaaagatattttcaagagcaagccggcttctctgctacatcctctggttatgttgggagttttaggaacttctttgtatactttccatttgggttatcagtcgagg

SEQ ID NO: 3926 - DNA, 317 bp, Cyanidium caldarium
  Clone ID: LIB190-012-Q1-E1-B4
cacgcgtccaatcagatgaaaatggtgaggtgaaaagcttataaaaatgttccacccaaggtctttacgtgaaggtttgatatacaagatgtaaataatatctttgtgtgatatcaaaccgcgaataaggaccgagatcaaaaatcgcgcttgacgatacgggggagtgcatcaagtaaaagtctctcatctcagacttcgcgaaacattattaaaaagttttccttatcacaacttatctcgaaataataaacgattttgaagaaaaaaacaaaaaaaacaaaaaacaaaaaaaaacaacaagacaaaaagaacac

SEQ ID NO: 3927 - DNA, 331 bp, Cyanidium caldarium
  Clone ID: LIB190-012-Q1-E1-B5
ccacgcatccgcagacgcgtgggccagcaaggaaataaagcgtttatacaagcgcttccagaaactagatagaaacagctcgggaactattgagagtgaagaactttatatgattccagaacttgcaatgaatcccttggttcctcgcattgtttctttgtttgacggagttaattttcgtcagtttgtttccttgttgagtgtgtttagtgcaactgcaccgaagaacgagaagattgactttgcttttcgtatatacgatgtggacaacgatggagttatttccctcaacgacctggttgacttgttacgaatgatggtcggtaataac

SEQ ID NO: 3928 - DNA, 411 bp, Cyanidium caldarium
  Clone ID: LIB190-012-Q1-E1-B7
aattcccgggccgacccacgcatccacccacgcgtccgcccacgcgtccgcggacgcgtgggggaaaattgggcaatgtacagggaagtatgacccagtaatgaggagtggagtaaacagaaaaggaagtaaaaggagggaatgaagggaagttatggcaaaaacacgtgccagcagcagcggtaaaacgtgtgtagcaagcgtagagcagaagaactgggtgtaaaggtcgagtagtagagtaagtgtaaaagggaaaggaaaggagagaaagaggaaagggatgaaatgcagagatctctagagaaaggcaagaaagaaaagaaaggaagacacagtaaatgaggcgagaaagcataggaagtgaaacggattaagaacccgtgtagtctatgcagtaaaagaaagaat

SEQ ID NO: 3929 - DNA, 432 bp, Cyanidium caldarium
  unsure at all n locations
  Clone ID: LIB190-012-Q1-E1-B9
cccgggtcgacccacgacgtccgattggaatgtattcctcatctcgtggccaaacatattacagagtgtttaagtattccaactatcggtataggagctggaaaatatacttcaggacaagttttagtatatcacgatatgattggaatgttacaacatccacatcatgccaaagttactccaaagttttgcaagaaatatgctcaagtaggagaagctatacaagaagcattggaaaactatcgtgatgaagtgatgcaaggaaaatttcctaatgaaacatatagtccttatcatatttcagaagaagaatatgaaaagtttgtacaagaaatgcaaaagcttcgtcctcncgtgtcctcctcgtctgcaaccattcccgacaatcttcacgagaatgtgcagttgtatggagatacganatagaaaact

SEQ ID NO: 3930 - DNA, 409 bp, Cyanidium caldarium
  Clone ID: LIB190-012-Q1-E1-C12
gagaatggacgataaggaactaggcaaaaggatatggtatctgcggtagaacatatgaaagaagcagcaccgactgtttagcaaaaacacagcactctgcagaaaagagaaaatgtaaagtatagagtgtgcggcctgccaaatagtagagaagaaatcgatgaaagtgaaagcgagtaaaagatgaggtatagagaatggcggtcctaacagtaaggatccaaaggtagcgaagtaaatagacgtttgaaaggcgtccagtatgaaaggagaaacgagtgtagcactgtctagtcgtccaactcagcgaaacagcaataactgtgaaaatgcagtaaactagcagtaggacggaaagaccccataattcttgactagataggtttagggaggagagagaatcatgaag

SEQ ID NO: 3931 - DNA, 447 bp, Cyanidium caldarium
  Clone ID: LIB190-012-Q1-E1-C7
aattcccgggccgacccacgcgtcaaaagagatggcataaggggtgaaaggccggttatgatcgacatattactattttctctccagagggacgactatatcaagtagaatatgcctttaaggctgtaaagtcagtaggaattaccaccgttgctgtaaaggggctggatgcagtttgtggagtaactcaaaagaaggttccagataagctcattgaccctaaatcagtcaccaatgttttccgaatatcggatcaccacggctgtattttcactggacttgcaacggacgcaagggcacaactacaacgaacacgatcggaagcagcagatttcaagtttaagtttggatacgaaatcccggttgaccagatagcgaaaagattggcggacatcaatcaagtttatacccaacacgcatatatgagacctttaggagtttcactta

SEQ ID NO: 3932 - DNA, 410 bp, Cyanidium caldarium
  Clone ID: LIB190-012-Q1-E1-C8
gacccacgcatccatgtcaacgtgggtctaagaaaatattattgctttattgttgaatagacaaggtcaataagaaacattgtgtgtttagtgtgaaaagaattgcaactcgtgtacgaagcatttttagagataaagagagttgcccaatgagcaatgcacagagtgtcgggtcctcgttagacgacgactttaagattccagaggacataaaagtaagtgaaaaggagaagtaaatgtaaaaactatatatttcgatagtgtccttgtattgctcagcttgtagaaagttcttgtaaaagtgagtttctcacttcgtttcgttgttacttggaaaatcgccagggtgggaagggacacctcatctgtaggacagaacttgaccagatggaatcctgtatgcgaaaaca

SEQ ID NO: 3933 - DNA, 395 bp, Cyanidium caldarium
  Clone ID: LIB190-012-Q1-E1-D6
aattcccgggtcgacccacgcatccaagccaagataaggtatcaaagtaaagaaagaaggaaaaggagaagaagagagggtaggcttagaagcagcaaaccagagaggaaagcgttaaagcatgaaagaaaagaaatccgaaaaagaagagaaaaaggtaagaaagaggaccgaatcagggtaagaggtagaggagcaagaagagaagagagaatgctgggtggagtagcgaaacaagagaagggaagtaaaaggtaagaaagaggaaaggtttacgagagaaggaagtagaaagaagagagtgtaaggcggcgtcataatagaaatccgaaaggagtagaagaaaagagagagaagaaagaaaagaagagaaaagccgtactgaagaacgacac

SEQ ID NO: 3934 - DNA, 435 bp, Cyanidium caldarium
  Clone ID: LIB190-012-Q1-E1-D9
gggtcgacccacgagtccggatgcgcaatgattgtttccgtggcaactcctgaagtgacaactactccttctactctagagaaaagacgaaatagtgactcgttattaccttcacaagctgaaagtttaaaagatggtttcaaacaagtggaagaacaacacagacgagatttaaaaaagctcgaaaggcggtataaaagcgctgtgaaacagctgcaactgaagcacagggtatgcaaagtgttgaaagcaaagaatacaggtggtgtaagtaaggaagaggagaagtgacccataaagtcatgagggagattgtgggagtgggaatgttgcctcttcatcctttctttctgaggttcagaggaatgtgatggtagaagttaacatcattatagagaatatttgtatataggaactacgatacagtggttttta

SEQ ID NO: 3935 - DNA, 356 bp, Cyanidium caldarium
  Clone ID: LIB190-012-Q1-E1-E10
gctcctacaggacttgttgttcctgtgatccgtaattgtcagaatttgaactttgcagaaatcgaaaaggctattcataaattgggtgaacaagcgagattagggaaactaaccattcaagatatgcaaggcggtacctttactatttcgaacggtggcgttttcggttctctcttatccacgcctatcctcaatatgcctcaaagtgcaatattaggaatgcatgccattcagaagaggcctgtagtcgtgaatgatcagattgtcatcagacctatgatgtaccttgccctttcttatgaccatcgtctagttgacggaagggaagcggtaacctttttaagaagaatcaaaag

SEQ ID NO: 3936 - DNA, 275 bp, Cyanidium caldarium
  Clone ID: LIB190-012-Q1-E1-E2
ccacgcgtccactaagggaatcatagcaataatttcggaaggagcggatagcttctaataaaaattagtatctagttattcaaaaaaaaaaaaaaaaaaaaaaaaaaaaaaaaaaaaaaggaaaagaaaaaaaaaaaaaaaaaaaaaaaaaaaaaaaaaaaaaaaaaaaaaaaaaaaaaaaaaaaaaaaaaaaaaaaaaaaaaaaaaaaaaaaaaaaaaaaaaagaaaaaaaaaaaaaaaagagaaagaaaaaaaaaagaaaaaaaagaggaaaa

SEQ ID NO: 3937 - DNA, 74 bp, Cyanidium caldarium
  Clone ID: LIB190-012-Q1-E1-E5
acaaaaaaaaaaaaaaaaaaaaaaaaaaaaaaaaaaaaaaaaaaaaaaaaaaaaaaaaaaaagaaaaaagaaga

SEQ ID NO: 3938 - DNA, 422 bp, Cyanidium caldarium
  Clone ID: LIB190-012-Q1-E1-E8
attcccgggtcgacccacgcagtcaattttacaatggtaaataccgtcactgatatttctagtttttctgcgaaagaaacggcttgttctaaacagcaccttgaaagtattttcactaatagtgaggttattacagctacagaaatacgagggatccatctacacgtatagcagtggtaaagagggctgtggcataaaagactacaacaacaaagcaagggctgggtgctgctgggaatcgaacccgggacctttgtgtttttgaaccaaaaaaaaagacaatagatacagcttcactgctgctgaaaaacgaaaaggatagacgttcaggacctttgctccgtatacctgtcttctctccaaaaaagggttcagtattgaacttgaaatcatacgatttcatatcagaacattaacccaaa

SEQ ID NO: 3939 - DNA, 187 bp, Cyanidium caldarium
  Clone ID: LIB190-012-Q1-E1-F11
aaatggcacttgcccttggaagagatatcttttcttttcaactagtggatgggatcctggaaacaggttatctggcgataggattccaagctaggcgtagctaggacgttgtatgcctagtcagtgtttagacatacgaaagggtagcatgtgacgttccttgaaactccaagacaagcctgtaaaa

SEQ ID NO: 3940 - DNA, 398 bp, Cyanidium caldarium
  Clone ID: LIB190-012-Q1-E1-F6
gacccacgcatccaaccgcgacgagataatgcagacggagcagttttgtagttgttttgtgctttgtcaagcttgtctcagtaatgaaaagcgacactcctagttaaatacatggcgttttaatccatataagtatagttcaagtcattctcactagtactcggaacaagtagtcgatagttttctacttgattttccagtgagaagtttgcaaaggaaaaggcaaaagaggtaggcagttttaatactgggaagtgacacatgtacaagtgagacctttgacgaaaacatttcactgtttgagaaaacaacctaggtgactgctttccatctacccaactttgcaacgaatacttttgcttcattgcttccacggcagagttacaaccttttccaac

SEQ ID NO: 3941 - DNA, 455 bp, Cyanidium caldarium
  Clone ID: LIB190-012-Q1-E1-F7
aattggcgggtcgacccacgcatccacccacgcgtccggtaaaaggtaagaaagaggaaaggtttacgagagaaggaagtagaaagaagagagtgtaaggcggcgtcataatagaaatccgaaaggagtagaagaaaagagagagaagaaagaaaagaagagaaaagccgtactgaagaccgacacaggtactcgaggagaaaggagacccaaattaaggtgagagaatggacgataaggaactaggcaaaaggatatggtatctgcggaagaacatgaggaagaaagaggcaaatacgggaaagcagtaaaagaagaaagagaaaggaaaaaactgagtatcaggaagaaaagagggagtagatgaggaaagaaagatcaacgaagtaagagtaagagaaggagtaatgttaaatgaaagcacggaaagtatttgaagaagagagtgtaaagcg

SEQ ID NO: 3942 - DNA, 402 bp, Cyanidium caldarium
  Clone ID: LIB190-012-Q1-E1-F8
gacccacgcatccagatttgtccaaaattggaagcgcgccaaaagtttcaaactgtgttgttatgactatgccattttgctttgtatttgatacgacttttaagttttcaaaaattccttatcgaaggtcttctaccgacctatgtaaacccaagcaccgttcgtctccattgaaacacaatacccaagcggtcttcttcaaggagaccgaaaagacaaagtctacagaacctgttaatgttaccagcgctcccaactcaaactcaaagtcggtcacatttgacggacagttgaataagtctgcttctaatacatctccacgaaccaatatatctctggactctgcaaagttaaaggagtactcttcgaagtttcccaacgatatttctttgcgacccgggt

SEQ ID NO: 3943 - DNA, 382 bp, Cyanidium caldarium
  Clone ID: LIB190-012-Q1-E1-F9
aaaacccctcaagcgtggtggagagacgagctagataaaaccaaaaaagatatgggaggattctttccggtgttgttttcttttgcggttggtactggagttggtgtgtatgtggcacaaaactatcgcgttcccaacgtgcagtggtggttgcaacaaaccacggatattgtgaggagaatggaaagacaagcacgcaagtctcaagaggaaaaatagtgaaagaagaaggttttttttggcgccttgtggagaagaaacaaagctattgctggggaatgaatccatatccaattatttatagatatatatacatatatatgtagcacggttatttgtggtttccaattctttggaaataaaaatgctgtagttggaatag

SEQ ID NO: 3944 - DNA, 361 bp, Cyanidium caldarium
  Clone ID: LIB190-012-Q1-E1-G1
attccttttacccctcttttgggtattttgtgtcctcaagcagtcatgttgggtttcctaccgactatatcaactagtttccccctaggacaaagtgaaagttgccactgttcccacgtatctaaatacagggttgggcagcgttttgtcgcacgcaactgtcgtcagcctcggcaaggaacaatcttgataatgtcaagcacaagctcttcggacaattggaaacagcagatacaagaaagcatcaagaaagcggaagaagcaacgcaaaagtatggaaaaaactcgaaagaagcagctgctgcctgggatgccgtggaagaactggatgcagaagcttctcatcagagagttaaaagaa

SEQ ID NO: 3945 - DNA, 390 bp, Cyanidium caldarium
  Clone ID: LIB190-012-Q1-E1-G4
acgcgtccagacaagttctagatgcagcggcctgccaaatagtagagaagaaatcgatgaaagtgaaagggagtaaatgatgaggtatagagaatggcggtcctaacggtaaggatccaaaggtagcgaagtaaatagacgtttgaaaggcgtccagtatgaaaggagaaacgagtgtagcactgtctagtcgtccaactcagcgaaacagcaataactgtgaaaatgcagtaaactagcagtaggacggaaagaccccataattcttgactagataggtttagggaggagagagaatcatgaagtagaggaggtggggtaagagatgaaagaccactgcatgaggataaggaatctaactgagtaaggaaaataagcttaagctagttt

SEQ ID NO: 3946 - DNA, 394 bp, Cyanidium caldarium
  Clone ID: LIB190-012-Q1-E1-G6
gccgacccacgcgtccacggacgcgtgggcttcaagtgcactgtctttgagagaagtggcctatcgattggaactttattttggtgtacgagagatccgtttggaacgtattgaggaaagcattttaagactcacctatcaggaaaaagtggggcaagtgtgatgcagttgtaactttataacttgaatatttcaatatgaacaaaaattagaaaaagtatacacacgtgtctgaattaagcaattgcaaaaaagaaaatcaatacaatcgctttttccacgcttcccaagtctcgtagtcaagacttagaatgagttgattatcttcaaacgaaagttgcgatgtggtactggaagtatccgttcgaaatggagcagaagatgtgctttcttt

SEQ ID NO: 3947 - DNA, 405 bp, Cyanidium caldarium
  Clone ID: LIB190-012-Q1-E1-G8
gtcgacccacgcagtccacccacgcgtccggtgggcctcccagacggaagtgtttccactttgcaagtggaacaagacgctacagtagaccaattaaaagaaaagatataccaagaaaagaagttgggccccaaaacaaaacggattcgtcttatttattcgggaaaattattgagcgaaggaacttcaaagttagtagattgcaaagtagaagatggctcctatgtgcactgtgttatctcagatgaagttgcatctggtcgtacgaaccacactcaggaaagaagcgaacgtttacagactcgcattcccgtggctgatccccagtcagagtatcgaggtttggaccgtctccgtgaagcaggtttgtacgaggaagagataactgttcttcgacgacaattt

SEQ ID NO: 3948 - DNA, 350 bp, Cyanidium caldarium
  unsure at all n locations
  Clone ID: LIB190-012-Q1-E1-H1
cccacgcgtccggaagaaagaggcaaatacgggaaagcagtaaaagaagaaagagaaaggaaaaaactgagtatcaggaagaaaagagggagtagatgaggaaagaaagatcaaggaagtaagagtaagagaaggagtaatgtgaatgaaagcaggaaagtatttgaagaagagagtgtaaagcgcgtaccttttgcataatgtcccagcgagtgaaagaggaagcaaaaagaaagaaaaagaagtagccaggtaagacccgaagctagttgatcttatgctgtccaagcgaagtaaggctgaaccagtatctgtggaaaaagatttggaagagatggcataangggtga

SEQ ID NO: 3949 - DNA, 414 bp, Cyanidium caldarium
  Clone ID: LIB190-012-Q1-E1-H11
accacgcgtccgaagcttattgtgccacttatcttcctgcttatgatatcttaattgaatgttacgaagatgtggaaagtggaaatgagataaggtcggttttacaagcttgtaagcgtcaccacaaaatacctatgggcaagattgatacaacccgaatgtggcaagttggcaagcaagtcagaaaaacaagagaggaatccagtattcccatcgttcctttttctgcaggtgtatacattgcagctatgatggctcagattgacattttgatggaaaagggacatccggtttcggaaattgtcaacgaatccgtcatagaatctgtagactctctcaatccatatatgcatgccagaggtgtttcttatatggtggataattgttctactactgcaagacttggtgcgagaa

SEQ ID NO: 3950 - DNA, 331 bp, Cyanidium caldarium
  Clone ID: LIB190-012-Q1-E1-H2
cacgcgtccaagcaaaatacgccatgttggtgtacaaagacgcttttacaggtgatgaagtatgttccgacgccatgaaaaacctccatgaagaggaaaacggtttgctgttggtatgtgactcgtacaacatttccaaaggaggggaagattatgggatagaagtaaacaacgatgaagatgaagaaggaggaggaggaggatcagataatgcggtggaacaagtgaatattgtggtcgagtcgtttggtttacaaccttttcccatcagcaaaaaggactttcaagtaactatcaagcgctatagcaaacgagtcaaggactatttgga

SEQ ID NO: 3951 - DNA, 396 bp, Cyanidium caldarium
  Clone ID: LIB190-012-Q1-E1-H4
gggtcggcccacgcgtccagcgatggatcgaggtcagtttgtgatggatggaggccctttaggcaatgatgggcgttggtatcctttgctcttatcgagtttggcacaaatggcctctccacctcttttcgagactcgcgaagcttttcttttgaaaagtgttgtaaagaatggacgattgattttgggtcgttttgaaaaccaagttcatgcaagtgtggatcctgcatgcagtgattatggttattaccatcatattttaagtagccgaggatgttcgagggcttggaagggatacattgtatctactagtaatgaaacaacagcaacaacaacaacaacctcctccaagaatcaagagcgatattctgtagaatatgcgttatcggatggaaa

SEQ ID NO: 3952 - DNA, 192 bp, Cyanidium caldarium
  Clone ID: LIB190-013-Q1-E1-A1
ctgcagcacggtccggcatccgggtcgagccacgcgtccgccacgagtccgtaaaagcattagctgtgggagcggatgccgtttgtattggacgagcaatattacggggcctgcatatgttggagttctgggagtaaagaaagttttggcaatattaaagcgggaattgagagatggaatgaaactttgtgg

SEQ ID NO: 3953 - DNA, 481 bp, Cyanidium caldarium
  Clone ID: LIB190-013-Q1-E1-A12
cggtctagaattcacgggccgacgcacgcgtcaggtggacttgtcgatccgccagaaacttgacaaggctattgttttcaccaagacattatacaaggttttatgtgacagaacctcagacgtgcaaagagactattcgtataacttttgtattgcaagacggaacaaaaaagcaagttgaagcacctataggaaagcatattctggagttggcccacgaaaacgatatcgacttggaaggtgcttgtgaaggttcgttggcgtgttctacttgtcacgtatacttggacgaacagtcctacaacaagttacctgagccttcggacgacgaaaacgatatgttggacttggcttttggactgacagaatattctaggcttggttgtcaggtagttgctagtccagaattggatggtatggtgattaccttgcctcctgctacaagaaatatgatggtagatgggcacgtatccaaacatta

SEQ ID NO: 3954 - DNA, 486 bp, Cyanidium caldarium
  unsure at all n locations
  Clone ID: LIB190-013-Q1-E1-A7
cgggtcggcccacgcgtccggttgaattgtatgtctgtagaagcagtactgtttgtttgctgcgttaaagagctttctgagggtcaggttttaggaggtctttaagtttttttcgcgtccttttgaatcctaagtttatagtggaaactaatcctgtcgaggcggagtcgacaatgacaataggaaaacgaaatttgacgtggttttatcgcctttagcagaagaagggtagctgcaagttagcccgagtgttgcattgattggagttaatctgttatatgcgcagcagaaaccgctaatactgtgctcgtggaaaaaacattccaacgattgctgctggcttcttgattttgaataatcaacactgagcgaatangcctaanaaggagcaagcaaataactgctacgatgagctgagaacagcttaagatcacgtctattgcgttcaagcgttgctatagtctcaacccaagctcaacaaaaccc

SEQ ID NO: 3955 - DNA, 488 bp, Cyanidium caldarium
  unsure at all n locations
  Clone ID: LIB190-013-Q1-E1-A8
cgggtcggcccacgcgtccgcggaaacgtgggcttagtcgtaccaatgcagattttgatctattagtaatggttgacgatgcgactcggggctcgtaggatcacagcggataccactttttcttaggacatcttaagagatattcacctgcttacgattcggtgcatcatcttcgttctagttgcagttatggagatggtgttggctctttaccgttgttggacaagttgtttcgaaccagttattatcagtagggatatcagtcgtttcccagtgtgaagcatcttgtagatgaaaagtcatcttgattgtcatagatgtgtcgacaatagaagttgttggctttgaatttgataatcaacactgaagcgaataggcctaaaagggagcaagcaaataactgctacgatgagctgagaacagcttaggatcacgtctattgcgttcaagcgttgctatagtctcaacccaagctcaacanaacccat

SEQ ID NO: 3956 - DNA, 292 bp, Cyanidium caldarium
  Clone ID: LIB190-013-Q1-E1-B10
ttcgacaattggtacagtctcaaggtaaaccaagtgatatagcagcacaaacaatattatctttattaaaagaccatacaacccaataaaacacccatacacacacacacaccaacataatagaatcgatagaacgaaagaggtggaaaaagtaatagacgcgagtgttttgtccactagtagagaatatttcctagtcctttgttgacgacatccaagatggattgtcccgtgacgatggaagttgccacaataaacgtcacacctacaaaataaaaaatgttcaaaataa

SEQ ID NO: 3957 - DNA, 461 bp, Cyanidium caldarium
  Clone ID: LIB190-013-Q1-E1-B12
ggtaccggtctagaattcacgggccgacgcacgcgtcagcggacgcgtgggcaacaaattcagcaaataatgttaaaaatagaagagtttgaaaacgacagaaatgaacaagaacttgttttgaaacagttgctgcctttgaacgaagatcgtaagtgttggagacaagtaggtaagtgttcttattgagcaaacggttggacaagtaaagccagtgttggaagccacgagtaaagagttgcagcaagcgatacaaaacctaaacgaagagttaaaaacaaaggaatcggagtttcttgaactgaaagaaaagtacaaaattcgggaagtggactcgtcctctatggcttcggcaccttcttcttcccaagcaacaaaaccataagtcgttgaaactcagccgttattgtcaagcactggcataaattggtttccatagattgccactgtgagagtatttc

SEQ ID NO: 3958 - DNA, 431 bp, Cyanidium caldarium
  Clone ID: LIB190-013-Q1-E1-C11
cggtctagaattaccgggccgacccacgcgtccacccacgcgtccgcccacgcgtccgatgcctccttttatgattcttattttggcttacttgaatgatggtacaattatgaccatctccaaggacagagtcaaaccatcacctcatccagatcgttggaacttgggtgaagtgtttattcttgcaacggcacttggctggtggctcactgcagcaactctcatttactttacaactttgtacaagacatctttctggacagatacttttcctctgtacgcagattggaagaatcccaagttgctcgctataaggcctccatacttcacttatggtcctcaaaatagttttatgctaaagtctctcatctatctgcaagtatctatgattggacaagctcttatcttctgtacccgtgcatactggatgt

SEQ ID NO: 3959 - DNA, 486 bp, Cyanidium caldarium
  Clone ID: LIB190-013-Q1-E1-C12
ggtgccggtctagaattaccgggccgacgcacgcgtcagcggacgcgtgggcaagccaaagtcaaacgagggaataggaattgtgagtggatgttgaaatatacagaagctttatgtgccatcgcctatttcgtacatggaaagccttaccctcatgagcacttgcaacaactgtggaaactggtattactcaatcaattccatgatactttaccaggaagtagtatccgtcaagtatatcaagatgcaagtagacaccacaccaaggtgtgcagagaattggaagatataatgaaggaaacattccaactgtttgtggaaaaacatgccacgacgaaccaacaaggcgtcaagtgcagttggatatcggaagactctagtacgagtgcggctagtctccattcttcttatcaacttgtgatatgcaatgatccatttccagatgagcagatatcctatcagacaacttttgatggcaaatatatg

SEQ ID NO: 3960 - DNA, 317 bp, Cyanidium caldarium
  Clone ID: LIB190-013-Q1-E1-C5
cgggtcggcccacgcgtcagcggaagcgtgggtgcgttgtgatcgagatgtcaacggagctcgcaatatattgttgcgctttttgagcaaataaatggaaattattttaaaaaaaaaaaaaaaaaaaaaaaaaaaaaaaaaaaaaaaaaaaaaaaaaaaaaaagggagaaaaagaaaaagaatcaaaacatatgttaagaataaatgtaatttaaaacccattcgaatagatcaccaaaattaaattaaagggaggtcgataaaaaaggtacttaagaggaaaaacactgctctaagacaatttaaacccattgtaa

SEQ ID NO: 3961 - DNA, 318 bp, Cyanidium caldarium
  unsure at all n locations
  Clone ID: LIB190-013-Q1-E1-C6
cgggtcgaccacgcgtccgcccacacgtccgctatcgaagtatttgccaccgcgcgaacaagagctaggcaaacaagcttttcgacgatacgaaattcttttacgagcttcctctgtaatcttactacttcagctgacaaaactgccatgataaagccagaaagacaaaggaagcctcnacaaaccatatcagttcccaaaaggtgctaagacctcctgaccaaacagcataaatcaggtgttaaagttaatcataaccccttcaatgcaggttctcaaaagcgaacattgaacctttaaaattcgccaaagaccaag

SEQ ID NO: 3962 - DNA, 475 bp, Cyanidium caldarium
  Clone ID: LIB190-013-Q1-E1-C7
ccgggtcggcccacgcgtccgcggaagcgtgggttcaagcaaactacttgctgttaccaaccaattgcgcaattcttgtttctgaaacagcaaaaattcttgttatacgtctactttttatttagatgtcaccaacgtgcaactagcctggtgaatagaacaagtgcccagtcaatcttatcactctggtggcaaatacagaaggtctggacgagtcaccatcttctcagaattttttgaagcatctttcctttggagagaatatcgtctcgagttttgtgtgtagaaagagcgtttcaactcagaacaactctccctcgagagttgtgacgccacaacggacgataagcttgtctaatacagactagggcttttggaaaaattcgaccagtttgtttcaaaatgtcttttcgtgagctcttttttcaagtctatgtggaagagaaacaggcaacactatatttcaaagatgacc

SEQ ID NO: 3963 - DNA, 406 bp, Cyanidium caldarium
  Clone ID: LIB190-013-Q1-E1-C8
cgggtcgaccacgcgtccgcccaagcgtccgagatattatcgtctgctcttctgtctattctgttgcttaatcattttacttattgctattctcgttcccattggagtggcagtcattcgtccaaataatggaggataatcaatatatgcgtgcgtgtgttttttcgttgttgtaaatggaaatatttcctatcgatatcaaaggaatcttgtgaaatagaaacagagaataggggaagtcgtcacaaggaccattcgtagtaatttgaataaatgttgtggtactcaaatgtaaaaaaaaaaaaaaaaaaaaaaagaaaaaaaaaaaaaaaaaaaaagacaaaaaacataaaaaaaaaaaaacaaaggcataggggaaaaactcaacgaatttgttccaaaatgt

SEQ ID NO: 3964 - DNA, 439 bp, Cyanidium caldarium
  Clone ID: LIB190-013-Q1-E1-C9
ccggtctagaattaccgggccgacgcacgcgtccgattttactgtttcgtttacttgtctttttgttgagttatcatggcacgaacaaaacaaacagcacgcaagtctaccggtggtaaggcacctcgaaagcagttggcaaccaaggcagcaagaaaatccgcacccgtaactggaggagtgaagaagccccatcgttaccgtcccggtactgtcgccctgagagaaattcgcaagtaccagaagagcactgaacttcttatccgaaagttgcctttccaaaggttggttcgtgaaattgctcaagactttaagacggacctacgtttccaaacttcggcggtgactgcccttcaagaagcctcggaagcatacttggtcggtttgtttgaagaatacaatctttgcgcaattcatgccaagcgtgtaactatcatgc

SEQ ID NO: 3965 - DNA, 282 bp, Cyanidium caldarium
  Clone ID: LIB190-013-Q1-E1-D12
gccgaggcacgcgtcagcccacacgtccggtacattcaacatcatcaaatgccaaagggaggaaagaaagattcttcaaagaaagaagccacaagtaaacctgcagcagcagatgctacaaagacgacagaaaagtctggtccggaagccaagttgaagggaactggtgcaaagaaacaataaaaagttgactatgcatgttcctgttatgttttgtgagttctgtttgatagtttccagctattcttttggtagtgaataaagagaaaattttttatattt

SEQ ID NO: 3966 - DNA, 461 bp, Cyanidium caldarium
  Clone ID: LIB190-013-Q1-E1-D2
cacgcgtccgcccacacgtccgaggtcctaacggtaaggatccaaaggtagcgaagtaaatagacgtttgaaaggcgtccagtatgaaaggagaaacgagtgtagcactgtctagtcgtccaactcagcgaaacagcaataactgtgaaaatgcagtaaactagcagtaggacggaaagaccccataattcttgactagataggtttagggaggagagagaatcatgaagtagaggaggtggggtaagagatgaaagaccactgcatgaggataaggaatctaactgagtaaggaaaataagcttaagctagtttggctggggaagtaaagcctaagaaagagtaaattaggcaagcaaaggcatgagagaagtataatagcagaagcatgcttgaagaaaaagaaagagatttcagaaagggaagaaaagtcagctatagagaacatgttaaggagaact

SEQ ID NO: 3967 - DNA, 470 bp, Cyanidium caldarium
  Clone ID: LIB190-013-Q1-E1-D3
acgcgtccgggaagatgagtgattttgtcatttgtgatataaagagaaaagattgcctactgaaatgattcaaataaggactgtgttaaaagtactagacaactcaggaccaaaaacagcaagatgtataggaattcttggaccacctaaaaagtttgctactgtcggtgacaagattgtagttactgcagagggaaaagtttaccacggaatcgtcgcctgttgtaaggtggaaaagaagagaccggacggttcctttgtaagaatcgaccagaacggagtcattctagtagattcaagtggaaagccagtgggaaacagagtatttggtgttttgagcagtagagtgaagcaaccggaaattctctccttgggacgcgtcaaaaccatgtaagctttaatagttaggtgtagaaactagtaaaaacttggcttgtaaccaacgacgagtcatcgttttgtcatcgttt

SEQ ID NO: 3968 - DNA, 473 bp, Cyanidium caldarium
  Clone ID: LIB190-013-Q1-E1-D5
cgggtcggcccacgcgtccgcccaaacgtccgcccacgcgtccgcccacgcgtccgcccacgcgtccgcccacgcgtccgcgcaaaggcagttggggcgtgccatgtcgagttttcaagcgctgggactgaaggaatggatcgttgaaacttgcaaggcactgaatattaagaaaccaactccttgccaggtagcttgtattccagaaacactaaaaggcaaggacataatcggttcttcagaaacaggaaccggtaaaaccttgtcttttgttttgcccattgtcgaccggctaagtgtggacccttgcggtatttttgctctcgtgttaacgccaacaagagaattggcttatcaaatatatgatcagttcaaagctatcggaggccctatatccattagagtagctgtggtgattggtggtatggagttgatacaacaagcaaaggaattggaaaatagaccgcatattg

SEQ ID NO: 3969 - DNA, 475 bp, Cyanidium caldarium
  Clone ID: LIB190-013-Q1-E1-D6
acgcgtcagcccaagcgtccgaaaaaaaaaaaaaaaaaaaaaaaaaaaaaaaaaaaaaaaaaaaaaaaaaaaaaaaaaaaaaaaaaaaaaaaaaaaaaaaaaaaaaaaaaaaaaaagggaggacgcccaaagggttcaaaaacttaattacacttaaataaaaaataaaaagggcgttcagccctttcacctaaattcatttcattggccttcgttttaaaacttcgcccttggaaaaaccccgaatttacccaacttaagccctttgtataaaacccccttttcgcaaaaagccttaatttcaaaaaggttttcccctttggcccttccccccttttccccaccctgaatggcaaatgggacccccccagttttggcccattaaacattgtggttcctggtggttacccacagcgtcccccctaaatttgcaatttccctagggcgggttcttttcgattccccccattccttt

SEQ ID NO: 3970 - DNA, 414 bp, Cyanidium caldarium
  unsure at all n locations
  Clone ID: LIB190-013-Q1-E1-D7
cgggtcggcccacgcgtccgcccacgcgtccgcccacgcgtccgcccacgcgtccgaaaagctaaagtgttttagcagctgctgaaaaagaaagattatgcttacttcttctggagtggcaccatcactataatttgtaaactatagcattcaataagcaaacgacatgaacgataaacgaataatattacctccacaaaaacacttctcgcaccgggatccttggaaggtttctgcaacatttttactagagaatccgttacccgacttttatcatagtaagcttgttctagtattcgacgaataacggtttcttttgtcaactgctgaaagaatattgtactaaaaaattggattcgtaatagtcctgcaataaaagaagccaacactgctttcaatcnactacgcttcttc

SEQ ID NO: 3971 - DNA, 478 bp, Cyanidium caldarium
  Clone ID: LIB190-013-Q1-E1-E10
cggtctcgaattcacgggccgacgcacgcgtcagattcaacgaacgatgaagttccagtacgttagtcttttattggctctcttatgcgtacgttctgctctggctgctgaattggcacctggaattgcggaaaaaccggtagagagaggatatgaggaaccctgctgtaccgaatattgttattgggaagaaatatgtatcaacacccacacccacacctacaccaacctactattactattattacgcaagaaatgcaaaacaggaaaatgtcgagagaagcgtagaaaagagtatctcttccgcagaaaaatctgatgcggttcgagggtatttccccacgtactactattatgagactcctacatattattactattatgagactccgacatattattactattatgagactccatccccaaccccgacaccaacgccttattgtacctatacccaaatgtgtaagagtatatg

SEQ ID NO: 3972 - DNA, 456 bp, Cyanidium caldarium
  Clone ID: LIB190-013-Q1-E1-E12
tgacggtctagaattcacgggccgacgcacgcgtcagcggacgcgtgggcggacgcgtgggcggacgcgtgggtgactgcaaagcgaccttctagtgttgttatggatgcgcttcacataacgaaagatatcaattcaatcgaaggcctttcatggatcaactttgcttttacgctattcctttgtggagtagcagcagttgacggattgttggtgggagataagaccagcagctccggcaaacagaatacaggagcgaacaatgcttgagtttcttgagaagttacaaatagtcgtgtctatgaagttgtctgagttgcgtgagaaaagacaagtagttgtgtctatgaagttgtcgtaaatagttgatgtgtgttgtgttgttttgccacagaaaggatgtttcgtccttggtggcgtttgcattggtcaataaatgacacgatttgtgtatac

SEQ ID NO: 3973 - DNA, 471 bp, Cyanidium caldarium
  Clone ID: LIB190-013-Q1-E1-E3
cgtggcaatcagtgatatacttctcctggttcgtatttcgttgaaggagacgcatcttcagcttcctatttccttgcgggaggcgccatttctggtggtcctgtaactgtagaaggttgcggaagtgattccattcaaggagatattcgctttgttcatgttttggagaagatgggagcaacagttagttggacgccacattcgattaccgtttctcgtgcaaaaggcaaggtcttggaaggaattgatgaagactgtgtagacatacctgatgccgcgatgactttagcagttgtagccttattcgctgagggacatacttgcttgagaaatatttactcttggagggtgaaggaaacggaccgacttgctgcaatgtccaaagagcttatgaagttgggagcagcagttatggaaggtcaggattatattgttatttatcctcctggaacagttcgaaagaatataact

SEQ ID NO: 3974 - DNA, 493 bp, Cyanidium caldarium
  Clone ID: LIB190-013-Q1-E1-E5
acggtccggccattccgggtcggcccacgcgtccgcccaagcgtccgcccacgcgtccgcccacgcgtccgtttatgacgaaacaagatactctcttcgataatatcattgctgccgaatcgagactcgtgcaacttcgaacgagtaacgaactatgtattcgacgcacacctttggacttttctcactctttaagcaaagaattgggttgtgaagtattcctcaaacttgaatcggaacaagttactggtacttttaaagtacgcggcgctttcaataagctcaccgttctttctttccaaaacgatagccgtcaacctattgtcacagcttctacaggaaatcacggtgctgcggtggctcacgcagcttccatgttgaagatacctgtttgtatattcgttcctcgaaacatacaacctaccaaggtggataagttatcaagttatgatgtggaactccaatatgaaggaacagactgtttagaggcgga

SEQ ID NO: 3975 - DNA, 460 bp, Cyanidium caldarium
  Clone ID: LIB190-013-Q1-E1-E7
cgggtcggcccacgcgtcagcccacgcgtccggtgacttgatatccacgagttctggtgccgttgtggattcaggcacaacaactctcgtatttgattcaaagtatttcagagacttgaaaaaatatttccaatccaagctatgtgacattcccaacgtgtgttccaatagttcagcatcttctgaaactattttttcggggggtggaggtgcttgcttttttttctctcctagcgatatcgcaaagtttcctactattaccatcgagttgtccagttttgaaatcaacttggaaccaaaagactatatgttgcatgtgcctcttagcgatattgaaagtggcaactcgacgattccagaaaaatcaaggactagttcttcggatgcctactgctttgcaattcttgactttccaggtttggagtcttccgaaggatatagcatgattttgggagatacc

SEQ ID NO: 3976 - DNA, 454 bp, Cyanidium caldarium
  Clone ID: LIB190-013-Q1-E1-E8
ccgggtcgacccacgcgtacgcccaagcgtccgaagagaaggaagaagcaaagaaggactataaggaaggaaggttcaaggaattagaattaaaaaaaggattaaggtaaatgaaaccaggaaattatttgaaaaaaaaattgtaaaccgcttacctttggcaaaaggtccaaccaattaaaaaaggaaccaaaaggaaggaaaagaaattaccaagttaaaacccaaaccaatttgttctaaggcggtcaaaccaaattaaggctgaacaattaccggtggaaaaaaatttggaaaaaatggaataaggggtaaaaggcaatccaaaccaattgaaacctggtaccccccaaaagcaataaaattaccttatgcaggaaagaaaaaggtaaaggaaaaaaaggaagaaccacaaaggaactataaccaaaaaggtgattatccaaaaggaaaa

SEQ ID NO: 3977 - DNA, 482 bp, Cyanidium caldarium
  Clone ID: LIB190-013-Q1-E1-F11
cggtctagaattaccgggccgacccacgcgtccacccacgcgtccggaaacgcctaactgtagttcacgattgatactgctgttttgtttggtctttataacgactataactttggtaaatgcaaaacgaaactattataaagtgctgggcgtggaaaagaacgcttccgagagagaaattaagcgcgcgtaccatcaactagcaaggaagtatcacccggacaagaacggcggtgacaagaaggcggaactgaaatttcgagaaatagctgaagcatatgaagtcctatcagacccacaaaaaagagaaacgtacgacttgtatggcgaagaagggttgcaatatggtgccaacagcgactttcaagctcaaggcagcaattcgcgcttcacagaacaatcttttcagggctttccttttggagactttttcatgaacgacttttttgcaagcggacgaaaaggaaacagttataagacgt

SEQ ID NO: 3978 - DNA, 414 bp, Cyanidium caldarium
  Clone ID: LIB190-013-Q1-E1-F12
cggtctagaattcacgggccgacccacgcgtcaggaagagagtaggaaaagaagaaagctagaaaggaggtaaaagaagagtaaaaggagggaatgaagggaagttatggcaaagacacatgccagcagcagcggtaaaacgtgtgtagcaagcgtagagcagaagaactgggtgtaaaggtcgagtagtagagtaagtgtaaaagggaaaggaaaggatagaaagaggaaagggatgaaatgcagagatctctagagaaaggcaagaaagaaaagaaaggaagacacagtaaatgatgcgagaaagcataggaagtgaaacggattaggaacccgtgtagtctatgcagtaaaagaaagaatgattaagaaaaaatggagtcattccaccaagggagtaaacgcgcaagaaag

SEQ ID NO: 3979 - DNA, 474 bp, Cyanidium caldarium
  Clone ID: LIB190-013-Q1-E1-F5
cgggtcggcccacgcgtccgcccaaacgtccgacacaggcctgttgtaaagctttgtatcgcattctacttagaggaagttcgctgcgaggacgtcctttacaagttttcgataatgccttgtggtcggtttcagtgcaagtactgttggagttagtattggcagtccacggtgtaactggagaacgaaatggtattgggtagacgccgtttaactggtaccatttcagttgttgtaggaagacccattccaaggaaaacatattgtggacccggtgtggtcttcttgagatacaagagggattactgttttcgaaaccgcttgaaggtcgcgttcgttttttgaattggagtgaaaacgagtggtttccctggctgactggaccaccgctttgcggcatccgttggaccgttcggctccacaccctttgaagatgagcactttttgtgggaggttggagaagagccttgtttt

SEQ ID NO: 3980 - DNA, 475 bp, Cyanidium caldarium
  Clone ID: LIB190-013-Q1-E1-F7
gggtcggcccacgcgtccggaaaaaatgaaagcaagcagtactggcacggagaaggttcagaatggtccaacaacacctgtaagaagtttttattcgaaagtgggacagagcccttctggttcggatagtgtgtatcattctccgtctccaagtgtccgtacgtcgccttcgagaaagataggcaaggtcactatttctcctatgtcaccagaaggtcgaagacagatggcacgaaggactccaatgacacccaaaaccaaagcgttatatgcttttggggaatctcctggtggtcattcgacacgaagcggtaagaaaccaaattacaacgataccggagtttcgggaatcgacgaaaacttgcaaggagctaaacccttatcttttaactgtggtgcttttggtagatataacagtttagttcctattctaattacatctgatggcaggcctcctcttcctcctcaagaacga

SEQ ID NO: 3981 - DNA, 446 bp, Cyanidium caldarium
  Clone ID: LIB190-013-Q1-E1-F9
gcgtccactctgacactatgatgacagtggaagagaaaccgatgtgacctacagcgatgtgggaggttccaaggagcagattgagaaaattcgcgaagttgtcgagttgccgttgttgaatccagaaaagtttattgcgctgggtatcgacccaccgaaaggtgttttgttgtacggacctcctggtaccggcaagacgttattggcacgagccgttgccaatcgtaccgacgcttgtttcatcagagttattggctcggagttggtacaaaagtatgtcggtgaaggagctcgaatggtgagagaactgtttcaaatggcacgttccaagaaagcttgtattatattttttgacgaaatcgatgccatcggaggtgctcgttttgatgatggcgctggaggagataatgaagtgcaacgtacaatgttggaaattgtcaatcaat

SEQ ID NO: 3982 - DNA, 481 bp, Cyanidium caldarium
  Clone ID: LIB190-013-Q1-E1-G10
ccggtctagaattcacgggccgacgcacgcgtccgcccaactagtagaagaatatgttggcgtttacttgtctcacagactgtcgttggttagagacttctcgattctccagatgtgccaaagccaataccgtctcgttgcgacgtagttcccagtgttcacactcttggaggagtgtttcgatgaactacagtccctattcgataactaccgacaaatcagaaggacatattgttcccggtactttttcaagatttgagtttcttgaaggtcgagtcaccggtccaaccgtcttgaaccctagcatacttgactttacagtgtctaatgtttcagatgctgcctttggagaatggagagcattatcggcttcaagtagagcaaaagaactggaacacagaagaaacgtcaccaaagcgacaatagaaagtctcaagaagactcctaccgaaaagtcaagggctacatttcctggacaact

SEQ ID NO: 3983 - DNA, 448 bp, Cyanidium caldarium
  Clone ID: LIB190-013-Q1-E1-G11
ggtctagaattcacgggccgacgcacgcgtccacccacgcgtccgcccacgcgtccgcccacgcgtccgcccacgcgtccgaactcaccagaaagaaaggcgtttcaaatatgcaagaaactggatgtcgattacgtgttggtgatatttggtggtgcgttagggtatagttcggatgatatcaacaagtttctatggcctattcgaatttctcattcggttgatccgacagtggatgaaagtgcttatcttacagccgatggtaactatcgcgttggggaaggagcgggtccagcgttggtggagtcgttgatgtataagctttgttattatagatttggagaagttcagtttgatcgcgggcatcctgctggttatgataaggttcgaggtgaagttatagcgaaaaagaacttcaaactgcgttattttgaagaaagcctttaca

SEQ ID NO: 3984 - DNA, 431 bp, Cyanidium caldarium
  Clone ID: LIB190-013-Q1-E1-G12
aattcacgggccgaggcacgcgtccgccctgctgatgtatcaaattccatttgaacaagttcccgagctagtgaaacatcgttcggtcattgttcgttcgggttatgcctatttgttctcggagcagttgaattcatttttggtttcttgctttagaagtttcttatcgaaaagtttgggagttgtacgtaagatggagcatcttgccgaggaacatggacaattgaagttgctgttggaaagcctaagagagagtcagcgattatatatcaatcatttttcatcctattcatttgaggctacagaacgtgaaggaacagggattcatttacaagatcttcctcaggccatgttggatatgccactttgtatgtttcgtttaatgaaacggttggagcagaatcatcatttaaaacatggcgctcgtcttc

SEQ ID NO: 3985 - DNA, 438 bp, Cyanidium caldarium
  Clone ID: LIB190-013-Q1-E1-G5
gggtcggcccacgcgtccgatttgatttggtggggacaacatttgcgggtgacgttggttggaatggcagaggcacaaaaggatagacaagaaacagaattggataaagcctcggagacttgtccttgtgttaagggttgtggctactatggaacatcgtcgaccttgaatatgtgctctaaatgctacagagaacaccaacgtcaagagcaacaaggacaaatggaatcggttggtccacaacaccagcttcaagaagagtcgttagacaaagcagaagaccgtttgcaaaatactacggaccttaaacatgtagatctccaacaagatacgtgtgtctcagaagctataacggggcagtcggagttgcaattggaagataccgctggggcttcccttgaagcaaatagcaggactttcgtttcaccttgtcaagct

SEQ ID NO: 3986 - DNA, 481 bp, Cyanidium caldarium
  Clone ID: LIB190-013-Q1-E1-G7
cgggtcgagccacgcgtccgcccaaacgtccgcccacgcgtccgttggcggttgttttcaaagatgagccttgcggaagagacaaccgcagtacaaataaaagtttataaatacatctcgttgggaatgataaaaacagctacttttatagcaagcaagctctattatgccactggaaaatcgtcagcagcaaaactcatctacctccattgcttattactaagtggagaggccaagagagcgaacagcttttttcagttacgaaacggcgaaaacattgactcgtttaacaagctggatagaattttttttcttcgtagcgtcttgtctcaacaagagtggaagcaaccatccaacagtgaaaaggatagcacacttgaatcctttctcgccaggaaactcgaagaccgtggaaactcaagagaccagcaacagggaaatttaatccaagtacgtttgggcaactttcctccaatacaaa

SEQ ID NO: 3987 - DNA, 466 bp, Cyanidium caldarium
  Clone ID: LIB190-013-Q1-E1-H10
attcacgggccgacccacgcgtcagggaaagcgaatcatcggaagtggtatatccaggttccacgataagtttggttgcgcagttaacacgagaagaagaagaagaggagacaggagataaacaaggacaagatggcgacctcgttcatcatcctattgcttacagtacgcgctttccagaaaagaaagaagaaagttggtggttattagtcggtgaattgggagctactccaacacttgttgctatcaaacgtctcatagtcaagggaggtggaaaaaagaatcaagtcaagttggaatggacggcaccgaatgaaataggaagtcatgaatacgttttatatctcatttgtgattcttacttgggagtcgaccaagaagaatccatttccattcaagtagttgatcctccttcttctacggttggtttgtgagtatcgatgagcgcttgcaaaaattgctgatg

SEQ ID NO: 3988 - DNA, 473 bp, Cyanidium caldarium
  Clone ID: LIB190-013-Q1-E1-H11
gtaccggtctagaattaccgggccgacccacgcgtcaacggacgcgtggggaacgagctcatcttttggttccacagacatgtcgaacgacaatcagtctgataagagcactttgaaagaagcggaggagaagctgcagagtgcagttcatactggaacagagaaagtttctcaggtgttgagcgacgtcaaggaaactgtgacggagaaatacaaggaatggacagcgccaaaaagtagccaagaagaagcaaaagaaaaagcacaagaagcgaaagaagaggctaataaagcttttaatgctatgaaagaaagtgcgagtgccgcttcagaggctgcatcagagaaagcagaaaaaattaagcaggatttgaaggagtgaagatacacagtagttttctcctatagtgtttttagtagtatctgtagtgatatttgtctcgtgatgaataaaacacgggttatcgtatttc

SEQ ID NO: 3989 - DNA, 409 bp, Cyanidium caldarium
  Clone ID: LIB190-013-Q1-E1-H12
cccacgcgtcaggaaaaaggtaagaaagaggaccgaatcagggtaaaaggtacaggagcaagaagagaagagagaatgctgggtggagtaccgaaacaagagaagggaagtaaaaggtaagaaagaggaaaggtttacgacagaaggaagtagaaagaagagagtgtaaggcggcgtcataatagaaatccgaaaggagtagaagaaaagagagagaagaaagaaaagaagagaaaagccgtactgaagaccgacacaggtactcgaggagaaaggagacccaaattaaggtgagagaatggacgataaggaactaggcaaaaggatatggtatctgcggtagaacatatgaaagaagcagcaccgactgtttagcaaaaacacagcactctgcagaaaaaaaattacc

SEQ ID NO: 3990 - DNA, 484 bp, Cyanidium caldarium
  Clone ID: LIB190-013-Q1-E1-H5
gggtcggcccacgcgtccggtgcatcatgaaactgctgcctttgttgattgtagcatgctttttgcttttcatagctaattactgccactctatacctatctctgaagaagcttatagttcgagccaatcatatggaaatgctggagcgtcgggttacgccgatgtatttccattatcaacaaatattccagagattgaagtagggagtgctgcctcctctggagacggggggagagctcattcaacagagtttgccacgtattcgcagggctactcatatcaaactccggagtactttcctgaatttgtgcaaccttcgtctaatgaagactatgaatacgtcgcaccttatgggaatccggagtattattggaacccggagtattattggaacccagaaggattatactacccaagcactactaatgaagagtggtataatccatctagttgggacgaatgggttccaacgactgatgaggg

SEQ ID NO: 3991 - DNA, 451 bp, Cyanidium caldarium
  Clone ID: LIB190-014-Q1-E1-A10
gacccacgcgtccacccacgcgtccgcccacgcgtccgccttggtgggcgactctggttactggtgcgtttgttaatcgagccgcaacctttcctctctgttggtatggacaggtaactggctgtttggactcagtttccgtgtaacttctcatttcacttgtagtaccacgctgataagttgagttcgttggctccagaactaaatcgggtcagatcatatgttagccgctcacctggaacttcactcgaaaagatcagaacttttcgtcgtctgcgacaggaactgctgaagagaagtgattcttcatctttgaaagtgattccttatgggaagttagctcacgtaccgctttttgtaaccgcggcatcttcagttagaaggctaacttttcaaagatacccggtgagtgtttctctactcatggttggggcacagttgatgaatttta

SEQ ID NO: 3992 - DNA, 409 bp, Cyanidium caldarium
  Clone ID: LIB190-014-Q1-E1-A11
ccgggccgacccaagcgtcaagaaaagaaaaaagaaatgagtggagtagtacaaggagcgaagatgatgggagcaggaatggcaacgataggtttagcaggagtaggagcaggagtgggaatagtatttggaagtttggtgaatgcatatgcaaggaacccagtattgaagcagcagttatttggatacacgatattagggtttgcgttaacagaggcagtaggactgtttgcattgatgatgagttttttgatactgttttcatagtataggagaaacaagaagtagaagagaaataaaagagacagaagaggagttatgagagaaaagatggaagtaatagaagtggtaagtggagtaataatgaatcatatgaaagaaggaatggagaatataaggaacgattaca

SEQ ID NO: 3993 - DNA, 450 bp, Cyanidium caldarium
  Clone ID: LIB190-014-Q1-E1-A12
cccgggccgacccacgcgtccacccacgcgtccggaaatttccgagttgtgtcgttgcctcatgggacgtattacggagtgggaacgacccgttcctcgttatccagttatcgacccaaaccctacaccgggtaaagtatggagcagtttggatctatccgagtacggtagaattgttttgcttacttccattgggtgcattattggtttgacttcagctacaagaacaacaagaacaagtagtgtattcatgggagggctttccggtttttggggctctacaacgtgggcttatatgtccactagaaacaaactcagagggatgaaagataacgggctcggtcgtataccgatcgaaatagcccaccagcaaatgagtaaataacaatctgcgagtaacaaaagtggacaacagcttgcgtcataaagctgattagtgagatccacaac

SEQ ID NO: 3994 - DNA, 389 bp, Cyanidium caldarium
  Clone ID: LIB190-014-Q1-E1-A8
ggtccgggaagccgggtcggcccacgcgtccgcccaaacgtccgcccacgcgtccgcggacgcgtgggttttcactcataagactccaagtaaagaccagaaaaccaggaacttcaggtttacgaaaaaaaagtggaaacattcagaaaacaacaatatttggtcaactttgtgcagagtattttcgactcgcttccagatatccaaggaaagacacttgtgttgggaggtgatggaagattctacaactccaaagcaatacgtattattgcccgaatggctgctgctaatggcgttggaaagctgctgatcggaaaggatggactcttgtcgacacctgcagtgtctgcgatcatacgtcacagaaaactatatggaggaattatatt

SEQ ID NO: 3995 - DNA, 341 bp, Cyanidium caldarium
  Clone ID: LIB190-014-Q1-E1-A9
gtcgacccaagcgtccgatttatgaagagaatccaatggattgcgattatacaaagttggggaattacaagccgatagagtgtgaagcaagttcgttggttattttacacggaagtttatggcacttttcttgtaaaaacaaaagcagtcaaagtcgtcatgcttattctttgcatcttgttgaaggaaaagatacggtttggagtcctgataattggttacaacctttcaagttgccttttgaaccattgtgatcctaaaaacatatcgaaaacccaaatttctcgtctcctttggggaacgtcgtcgtctgtgcgtcccaatcactgcggactgtcttt

SEQ ID NO: 3996 - DNA, 423 bp, Cyanidium caldarium
  Clone ID: LIB190-014-Q1-E1-B1
ggtccggagattcacgggtcggcccaagcgtccgattcaacgaacgatgaagttccagtacgttagtcttttattggctcttttatgcgtaggttctgctctggctgctgaattggcacctggaattgcggaaaaatcggtagagagaggatatgaggaaccctgctgtaccgaatattgttattgggaagaaatatgtatcacacccacacccacacctacaccaacctactattactattattacgcaagaaatgcaaaacaggaaaatgtcgagagaagcgtagaaaagagtatctcttccgcagaaaaatctgatgcggttcgagggtatttccccacgtactactattatgagactcctacatattattactattatgagactccgacatattattactattatgagactccgacata

SEQ ID NO: 3997 - DNA, 159 bp, Cyanidium caldarium
  Clone ID: LIB190-014-Q1-E1-B10
gacccacgcgtcagaaaaaaaaaaaaaaaaaaaaaaaaaaaaactgaataacaaaaaaaaaaaaaaaaaataaaaggggcggcagctctaaaggatctaagcttaagtaaacgtgaaagggacgtcaaagcacgtcaatagtgtcaccaaaattcattt

SEQ ID NO: 3998 - DNA, 276 bp, Cyanidium caldarium
  Clone ID: LIB190-014-Q1-E1-B11
ggttacggtcaggaattcccgggccgacccacgcgtcaggaaataagttacatgtatccgtggagtataggaatggaagaaactcgtcagactcatgatctgaaggaagtaggttcaagtcctatctccgcaagagtaagaagggaaagagaaaagaaaaaaaaaaaaaaaaaaaaaaaaaaaagaaaaaaaaaaaaaaaagaaaaaaaaaaaaaaaaaaagtaaataaaaaatcaaaaaaaaatcaaaagtgtcaaaaaagttcaattcaaaggg

SEQ ID NO: 3999 - DNA, 265 bp, Cyanidium caldarium
  Clone ID: LIB190-014-Q1-E1-B8
attgttgccgaagatgactattttcaacgtgaaagggcggatctccaactccttgccccaattacatttgctcaaactgcacttggaggtacaataagagtttcaacactacatggtgaaatgggaatgaaaataccgcctggaagtcaatcaaatgatatgaaagttattaaaagtccaggtctcccgaaaataggctctcgaggatatggaaatcagtacgttcacatccaagttgttgttcccacgcaactttctccaaaac

SEQ ID NO: 4000 - DNA, 397 bp, Cyanidium caldarium
  Clone ID: LIB190-014-Q1-E1-B9
ggtcaggaattcccgggccgacccacgcgtcagcccacgcgtccgcccacgcgtccgcccacgcgtccgctcaagtggatcatcccacgttggtaaagatagacttgtctcaaggcagctttaaagtactccaagactgtgacagagatttagaatgtgatcataataccaagtttcagttggaacttattcagtatggtctcttttcacctggtttttggacgagagaaaatgttctgctcttctatttggagctcgtgtcaggtgtattcataagggacactctctaccttttctacaacaaaggtgaagaacatttgtttgcgagtttaatgctgttgttggagacacaagtttcactgtatgcagacattaaaacaaactgggagaaacgaca

SEQ ID NO: 4001 - DNA, 405 bp, Cyanidium caldarium
  unsure at all n locations
  Clone ID: LIB190-014-Q1-E1-C5
cggtccgggaatcncgggtcgagccacgcgtccgatagaagaagatcatcttcatccagaagaacatgacttggaggataactgcagtggaagtagtgaagatggtgaggacgatattgcaagtgaagacgaatatacggaagattccaatccatccgtgcctataagagatggttcatttgaacaatattatactggacactgtaatgagttgacgatcaaggaagtttccttttttggaagtgactgcaaatatgttgtcagtggtagtgatgatggctatattttcttgtggaatacgcaaagtggcaagttgatcaatgtcttggagggagattgtagtgtagtgaattgtattcagagccatccgatagatcctttgatggcctcttcaggaattgagga

SEQ ID NO: 4002 - DNA, 401 bp, Cyanidium caldarium
  unsure at all n locations
  Clone ID: LIB190-014-Q1-E1-C9
ccgggccgacccaagcgtcaaggaaggtattcccccagaccagcaacgtttgatttttgcaggtaaacagttggaagatggtcgtactctctcagactacaacattcaaaaggagtctactcttcacttggtcttacgtctgaggggtggaatgcagatattcgtaaagactcttactgggaagaccatcactcttgaagtggagccctcagatactattgaaaatgtcaagtcgaagatacaagacaaggaaggtattcccccagaccagcaacgtttgatttttgcaggtaaacagttggaagatggtcgtactctctcagactacaacattcaaaaggagtctactcttcacttggtcttacgtctgangggtggaatgcagatattcgtaaagactc

SEQ ID NO: 4003 - DNA, 327 bp, Cyanidium caldarium
  Clone ID: LIB190-014-Q1-E1-D1
tgatcatttcccctttttgtttgtttatcgtttgtcaaagtttggttgttttcttggtagcagttgtacattcaacatcatcaaatgccaaagggaggaaagaaagattcttcaaagaaagaagccacaagtaaacctgcagcagcagatgctacaaagacgacagaaaagtctggtccggaagccaagttgaagggaactggtgcaaagaaacaataaaaagttgactatgcatgtgcagtcctgttatgttttgtgagttctgtttgatagtttccagctattcttttggtagtgaataaagagaaaattttttatatttaaaaa

SEQ ID NO: 4004 - DNA, 389 bp, Cyanidium caldarium
  Clone ID: LIB190-014-Q1-E1-D10
aattccggttcgacccaagcgtccgcccacgcgtccgtgcttgtttacctatgtcgattatagtgttttccacaatatatttgctgtggctgctcaaaatagtaatccagttcgtgttcccaacgaatcttgtaaagaaatgaatgaagaacaactcaccaacagaagaaggtaaaccagttggaggagacttgttatttatagtaccgaaatggagtgactatctataacacaatcgtctgactatgatgattttaaaaggcagatattttaaaagccttgtaaagcaatcctattttttttaaaaaaaaaaaaaaaaaacaaaaaaaaaaaaaacaaaaaacaaaaaaaccaaaaacaacaacaaaaacaaccacaaaggggcgaac

SEQ ID NO: 4005 - DNA, 445 bp, Cyanidium caldarium
  Clone ID: LIB190-014-Q1-E1-D11
gtaacggtcaggaattcccgggccgacccacgcgtcaggagataatgcagacggagcagttttgtagttgttttgtgctttgtcaagcttgtctcagtaatgaaaagcgacactcctagttaaatacatggcgttttaatccatataagtatagttcaagtcattctcactagtacgcggaacaagtagtcgatagttttctacttgattttccagtgagaagtttgcaaaggaaaaggcaaaagaggtaggcagttttaatactgggaagtgacacatgtacaagtgagacctttgacgaaaacatttcactgtttgagaaaacaacctaggtgactgctttccatctacccaactttgcaacgaatacttttgcttcattgcttccacggcagagttacaaccttttccaactttccgctaaaagtcaaaagagtttattcga

SEQ ID NO: 4006 - DNA, 385 bp, Cyanidium caldarium
  Clone ID: LIB190-014-Q1-E1-D12
acccaagcgtcagatattgcagttggaattagtggagctattcagcatttggcaggaatgaaagatagcaaagtgattgtagcaatcaacaaagatcctgacgcacctatttttcaggtagcggattatggtctagtggcagatctttttgaagctgttcctgaaatgaccaagttattagatcaagatggaaagacagctgtccattcttaggtgacatttcattttgttcgatacaacttaaagataaatatgacttccttgaaaaaaaaaaaaaaaaagtaaaaagtgagggacagacaaaacagataaaagattacaaccaaatcaaagtcagcggcgaacactttaaaaaacataaaaaaaaaggggcggccgcccaaaa

SEQ ID NO: 4007 - DNA, 471 bp, Cyanidium caldarium
  Clone ID: LIB190-014-Q1-E1-D5
ggtcgggattccgggtcgaccacgcgtccgcggaagcgtgggtaagcgtgcagaagaactccgagaaatgttttctgatgtgaatatcagaatatggccttgggaaggcttaatggatgtggtaagcacctcagaagcgatctttacttgcacgagctcgtcggaacctattctatgtgcggataatttacgaggtactttggcagattcttcaggaacacttgtcgttgatatatctgttcctcgaaatgttgcctcggatgtgaaggaggttccatatgtctattcctacaatgtggatgacttgaaagcggtagtggctcagaatcagtcacgtcgtcgcaagctagttcaagaagcagaaagtttgttgagtgaagaattgcatgtcttttgtaattggcatcattctcttggagctgttcctgctatcactcgtttacaagagcgagcagaaagtattcgttcgga

SEQ ID NO: 4008 - DNA, 439 bp, Cyanidium caldarium
  unsure at all n locations
  Clone ID: LIB190-014-Q1-E1-D9
attcccgggccgacccaagcgtcagcttcgacgtcgtggactgaccgttctgttggcataggtacaacagagcactcaagagacgtgaagcaagtaaaagtcgttcgaacataaaatggttcagttatttgtaaaaagtcttcatagcaagactctttcgtttgattttcccgcggatacctccatatggcaactacgaaagcaacttgcggaagttgaaggcgttcctctagcagctttaagaattggttctagtgttactgatttaggggatgagaagagtataggagatctcgatagtcagtttttgtttactagcttgagacttatgggaagtgcganngagaagagaaaaagtcttttacgaaaccgaagaagatcaagcataagaagaaaagggtgcacttgcagtgctgaagttatataaagtctcggacga

SEQ ID NO: 4009 - DNA, 473 bp, Cyanidium caldarium
  Clone ID: LIB190-014-Q1-E1-E1
gggtcgggccacgcgtccgcccacgcgtccggtttgaaaggcgtccagtatgaaaggagaaacgagtgtagcactgtctagtcgtccaactcagcgaaacagcaataactgtgaaaatgcagtaaactagcagtaggacggaaagaccccataattcttgactagataggtttagggaggagagagaatcatgaagtagaggaggtggggtaagagatgaaagaccactgcatgaggataaggaatctaactgagtaaggaaaataagcttaagctagtttggctggggaagtaaagcctaagaaagagtaaattaggcaagcaaaggcatgagagaagtataatagcagaagcatgcttgaagaaaaagaaagagatttcagaaagggaagaaaagtcagctatagagaacaggtgaaggagaactcaaaaagaggagagcaccgaacgatcgaagaagaaactttgggggt

SEQ ID NO: 4010 - DNA, 350 bp, Cyanidium caldarium
  Clone ID: LIB190-014-Q1-E1-E10
ccgggccgacccaagcgtcaggaaatattggagtcaaagtaatttgtggacctggaactcgcattccagatgcagctatgcaagtattgaaagccattgaagaagaaccaaccaacggtgcaagtaatggtgtggaacaaacatcgtagtagaaattataagaaaattatttcgttataacaaaataaaaacattttcaagaataaaattaacacctttgagttcaccaagctcccaaaaaataacgttctgccaaaaaaaacgggcggccccccaaaaggtttcagcctcacttacccttaaaggaaaattcaaacctcttcaaaagtccccccaaaataaattccacg

SEQ ID NO: 4011 - DNA, 150 bp, Cyanidium caldarium
  Clone ID: LIB190-014-Q1-E1-E11
aattcccggtctgacccacgcgtcaggtgcttcgcatcatacaacaacacaaattatttaaaaaagagattcctccagctaatcctgttgcttgacatgcagaaaaaacactattgtaaataacttgtgttgtcgtatgatgcaaagcac

SEQ ID NO: 4012 - DNA, 321 bp, Cyanidium caldarium
  Clone ID: LIB190-014-Q1-E1-E8
cgggtcgcccacacgtccgcccaaacgtccgcccacgcgtccgaaaggcgtccagtttgaaaggagaaacgagtgtatcactgtctagtcgtccaactcagcgaaacagcaataactgtgaaaatgcagtaaactaacagtaggacggaaagaccccataattcttgactagataagtttagggaagagagagaatcatgaagtataggaggtggggtaagagatgaaagaccactgcatgacgataaggaatctaactgagttaggaaaataagcttaagctactttggctggggaagtaaagcctaagaaagagtaaat

SEQ ID NO: 4013 - DNA, 430 bp, Cyanidium caldarium
  Clone ID: LIB190-014-Q1-E1-F10
ccgacccaagcgtcagggactgtgaaggattgttgttgtgtgttggtgacacaccatgcagcccatgtacagtagcagagaaaggtatccatattatgacggtgaagtatatgatgacacgggtgttgttcccccggaaacaaggcccaaaggaagacgtgtcatagtagaagagccagaagagtacggaatgccgccaggggacagagatgatagcgaagatgacgagcacattggtggttggagaagaagagaacagcacagcatgcagccttggaaccagtcaccttttgaacattttgacagacttttcgaaaatcccttttctgcaatggagagaggatgattcggtggattatttggtaacttgggacagtccttaagaagactggaggacgactttgccaaaagtgggggaaatggaagtgct

SEQ ID NO: 4014 - DNA, 429 bp, Cyanidium caldarium
  Clone ID: LIB190-014-Q1-E1-F11
gtcaggaattcccgggtcgacccaagcgtccagtaagactttcattcacggaaaatgtacaaactgcatacatattctaacaacccaagagctcaaaaagcactgattgcggccgaatatgcgcaagtgtcagttgaagttccaccctttgagatgggtaaggataacaagactccagagtttcttaagctatttcccttgggaaaggtaagctatgttggattctctattggactgtgcccttatttggaagtaggttccagctttggaaactccccagggacctatttcagaaagtcctgcaatagcctggtattttgcaaaattgcgccaagataagggtctctgtggaagtaccttttatgaagagtgtcaagtacaacagtggatttcttttgcagaagatgcttttacgaaacattatccagt

SEQ ID NO: 4015 - DNA, 382 bp, Cyanidium caldarium
  Clone ID: LIB190-014-Q1-E1-F12
atgaaacatgttgttttttatgctcaccgaagaggcgatttggtgctttgtgatgaacttcgacgaaattttatgaatatgaaaccaagaaacttcctgatcgtagatgaacacaatgctctttggcagaaatttggtagtgacactaaaacgtggttacccttctttgagttttatgcagatccagtaggacatgctgccgtaagtacatgcgtttccttccttttgatcattaactggggatagtggtattgtaaatttgttatcgcaacttcgcagcttcacgagttcaagctgccgagtggatatagaaattctaagaggtatgtggaaccattgagccgagaagaatttgaaatcagatattccgggataatgaaag

SEQ ID NO: 4016 - DNA, 474 bp, Cyanidium caldarium
  unsure at all n locations
  Clone ID: LIB190-014-Q1-E1-F3
gtccggcaatccngggtcgagaccacgcgtccgcagttatcctatactaaaatgttgtctcttcaaggcaatactgcgccgtatatgttgtatgcttttgcaagaatacaaggaatatatcgtaaaggagatatagacttgaaccaaggtcatcaagcagaaaacgtacaattcattctggacgatccgacggaactgtcgcttgcaaagatgttgcttcaattggaagaaatgttatttttactagaaagggacttgaaacctaatattttatgcgactacatgttcgaactaagtcaacgctttaaccaattttatgagaattgtccggtactcaaggcagaaacggtggaccttagaacttctcgacttgccttgtgcaaactgactgcgaacacactcgcactgtgtttacatttgcttggaattcctactttagaaagaatataaaaatatatggagaagcaaccaana

SEQ ID NO: 4017 - DNA, 380 bp, Cyanidium caldarium
  unsure at all n locations
  Clone ID: LIB190-014-Q1-E1-F4
gggtcgagacacgcgtccgggcaaacggagttgaccattggattcctctttattttcaacaggaggaaaccttccttttgaagctggatttgcccatcgttactggttcggcgtttttaggctttgttcttttggttatgagtttcacctgtatgaatattactattccaccttacaacagtccacagatcatcaagatttgggcagtattcataagcattttgggctttttgttgcttttatccttttcttccatgttttactggatgcgaaaaaatgctcctcgaacggacttatanatgccttaccatggagcttttcgcggtgttatgaactttgaaaaataaatttgggttgcttccatttantacaattgccac

SEQ ID NO: 4018 - DNA, 369 bp, Cyanidium caldarium
  Clone ID: LIB190-014-Q1-E1-F7
gaatgtacgaaagaaggaaaaggagaagaagagagggtaggcttagaagcagcaaaccagagaggaaagcgttaaagcatgaaagaaaagaaatccgaaaaagaagagaaaaaggaaagaaagatcaaggaagtaagagtaagagaaggagtaatgtgaatgaaagcaggaaagtatttgaagaagagagtgtaaagcgcgtaccttttgcataatgtcccagcgagtgaaagaggaagcaaaaagaaagaaaaagaagtagccaggtaagaaccgaagctagttgatcttatgctgtccaagcgaagtaaggctgaaccagtatctgtggaaaaagatttggaagagaatggataaggggtgaaaggc

SEQ ID NO: 4019 - DNA, 504 bp, Cyanidium caldarium
  Clone ID: LIB190-014-Q1-E1-G1
gcctgcgcctatcggtccggacattccgggtcgaaccacgcgtccgcccacgcgtccgcccacgcgtccgcccacgcgtccggagattgcaagaagataatattttgaatagagcactatcacaaccaggagatgtatttctgtgcttttgcaacatccagttgttggtgaatgcagaaagagctattataggaaatattacttgtccagaaagtatcgaattgtgtcgtctattagctggacatatagcggtttggttcgatgaacatttggatgactttcgtttggaagctatcttgggagcactattgtgtacttgttattgtgagtggaagcgttttgaaggagaattgggggtacaagaatggaatgaattggagaagatatcttccttagatacttggaagcttgtgcttggtacaagacaaagagtggataatatgttacagcgagtacacaagctgacgagcatcttgtcctttttatactcgggcgaacaaccga

SEQ ID NO: 4020 - DNA, 434 bp, Cyanidium caldarium
  Clone ID: LIB190-014-Q1-E1-G10
ccgggccgacccaagcgtcagggaagacgcgccgctgggaacgaccaatccttatggaaataccaagctttttatacaggaaattctaaaggacgtttacaacgcagataatacttggaatgccgtggtccttcgatatttctaaccctgttggtgcacaccccaatggtctcatcggagaagatcccaacggtattccaaacaacttgatgccttaaattgcgcaagttgctgtatggacgtctacccgaacttagcgtctttgggaatgactatgagacgcatgacagaactggagttcgagactatattcacgtcgtcgatctagccaagggacatgttgctgctcttaacaagatggagaagcatgccacacgttgggttgcagttaatttgggaactggcaaaggctattctgtgttggaaatggtaaa

SEQ ID NO: 4021 - DNA, 488 bp, Cyanidium caldarium
  Clone ID: LIB190-014-Q1-E1-G3
gtccggctattccgggtcgagccacgcgtccgcccacgcgtccgggtttctactactgtatttcttgctctgcccagtgttgtaaccgaaacaagtaaatttgaagcatggttacgatcttcgcgtcttttgaatacttttacagttggaccgcaagcaagtgaaagtagtctttgctgcttgaagtgtcacgctcttgtttgggggacgtcaggaccattattgtgacactttcctcttttttttatgaagtagggtctattttatgggttccttttctcaagctttcagtcaaagtatatatatatatatatatatatatatatatatatgtggaaacttgcgtcacggaagataccaagttttgaagtgggttttacttttcgacaaacgaaaggcaatcatagcagctagtttgcttttgtcctagtacatgagtcgttgcaaaggcaacttttttttaaaaaaatatagactagtccagcgag

SEQ ID NO: 4022 - DNA, 462 bp, Cyanidium caldarium
  Clone ID: LIB190-014-Q1-E1-G6
gggtcgacccacagcgtccggtcgatggttagtggcaagggtagtagtaggagggtactgataaagtactttttatgaagaaaggagggaaaaaactagcgcaaactgaagctctcttactgaagacttggaattttcaaaaacgtcaacacggtgaaaatgcttgtaatattcttgtaccaatagtgcttcttgttttgacatttgttctgggaaaagtactcagtgctggtagtagggtacctgtgaaggcaagtagagcaaatcctataggcgcttttgctccgttgccttttgatccttacgactgtcatcgagcttatagcgacccagaactatgtctcaaggacccttttgcaccgaggcctattatatttccatattggtccgtgaatgagacagcaacggggtttgtcaagtacaacccttgtaaccctctcaagaacgaaacacagtgtttgc

SEQ ID NO: 4023 - DNA, 381 bp, Cyanidium caldarium
  Clone ID: LIB190-014-Q1-E1-G9
attcccgggtcgacccaagcgtccgaggagcaagaagagaagagagaatgctgggtggagtagcgaaacaagagaagggaagtaaaaggtaagaaagaggaaaggtttacgagagaaggaagtataaagaagagagtgtaaggcggcgtcataatagaaatccgaaaggagtagaagaaaagagagagaagaaagaaaagaagagaaaagccgtactgaagaccgacacaggtactcgaggagaaaggagacccaaattaaggtgagagaatggacgataaggaactaggcaaaaggatatggtatctgcggtagaacatatgaaagaagcagcaccgactgtttagcaaaaacacagcactctgcacaaaagagaaaatg

SEQ ID NO: 4024 - DNA, 422 bp, Cyanidium caldarium
  Clone ID: LIB190-014-Q1-E1-H3
gtcggacattccgggtcgaaccacgcgtccgatttgtgtgtcgttgcttgttggggtgtggtttgttgctgtccagggaatatttcttagtaatcgatcatggcacagagcaagactttagctcactttgaacctgtgaatctatacgagtttgaagctttggcaaagttgaagctaccaaaaatggtttatgactattacagttcaggagcagacgatcaatatacacttgcagataatattgaagcttttaaaagacttcgtttggttcccagagtattggtggatatatctgcccaagatatttctaccactatattgggtgttccttccagttttccactggtcattgcacctactgctatgcaacgaatgggacatcccgatggcgagtgtgcaactgcaagagcagcagccaagaa

SEQ ID NO: 4025 - DNA, 97 bp, Cyanidium caldarium
  Clone ID: LIB190-014-Q1-E1-H9
ttttctttcttttactgcatagactacacgggttcctaatccgtttcacttcctatgctttctcgcctcatttactgtgtctgtgtttctatttgcc

SEQ ID NO: 4026 - DNA, 57 bp, Cyanidium caldarium
  unsure at all n locations
  Clone ID: LIB190-015-Q1-E1-A3
ttacatacgcgtgtatgcgacgtcatacatcatcggaaccgtcancttaattcaaaa

SEQ ID NO: 4027 - DNA, 405 bp, Cyanidium caldarium
  Clone ID: LIB190-015-Q1-E1-B11
gggccgacccacgcgtccacggacgcgtgggcggctctcttgacgatgaagaacacggcaaaaagcgaaatgtagtgtgaactgcaagttttcgtgaatcattgaatctttgaacgcaagttgcgctttgaggagaatttattttcctggaagcacgtctgtgggagtggatgagaattgtctttttccaatagaggaagaggataataacatgtttatagagcttttcagggttgggcattcgtcgcctaacgataattctagtggtagcataagagaagataatttgatacatttatggaatagtgaggaagagaagaacttttttttcttgctagatgataatatctatatatacatatatatcatacaatatgtatttgtacgataaagaatttttctccc

SEQ ID NO: 4028 - DNA, 320 bp, Cyanidium caldarium
  unsure at all n locations
  Clone ID: LIB190-015-Q1-E1-B9
cccacgcgtccaggtagagattggttttcttttcgtccacgcttagaaccgttactttttgtcgtgacaagttataatataaaatggccaaagtaaaccctgtgtcgtcggctcctaaactgggtgtaactagagagatacctatcggtattgggcgtggtatancgtgtgctatggtatttcgccagtggcatctcggatacacggaaatgataagaaaatattatcgcgagttggatgaacaagaacagagttcctcgtcgtcgtgaaaaccgccttgtgtttgtgagatagcaataaagtggactcttgtttttttt

SEQ ID NO: 4029 - DNA, 112 bp, Cyanidium caldarium
  Clone ID: LIB190-015-Q1-E1-E12
cgcgtccaaccaaacctccactccacacgtccgcccactcaaaaaaccacgcctcccgtttctgtggccaattatcagaatacctcttttcaacgaacaacgacaacaccaa

SEQ ID NO: 4030 - DNA, 420 bp, Cyanidium caldarium
  Clone ID: LIB190-015-Q1-E1-E5
tcccgggccgacccaagcgtccagaaagacattttaaatgaggcgagaaagcataagaactgaaacggattaggaaaccgtgtagtctatgcagtaaaagaaagaatgagtaagaaaaaagggagtcggtccaggaggggagtaaaggcgcaagaaagggacccagggcaattgacgggaatcggaaaaaggggtggatcacgtaaattaatccgatataaaccgagaaccttacctctccaagaaggtgttgcacggctgtcgaaagaacctgctgtgaagtgagagaacgtacgacaaagccaagtgaggaaaagaaggcaagtatttttttgcccgagaaaggagagggcgtaagacgtgatacacagtacgaagaacagagaagagagctacaaaggacgtaaaacaacagtaaaa

SEQ ID NO: 4031 - DNA, 373 bp, Cyanidium caldarium
  Clone ID: LIB190-015-Q1-E1-F10
acgcgtccagaaaagctttctatctttctgaaagctgctgatctattgagcactacatatcgagcacaagcttgtgctgctgtgatgttgggacaaggaaagacagtatggcaagcagagggggatgcggcagtagaaaccatcgatttggggagatttggttgcaagtttgcagaggaaatttacaacgtgcaaccgcctgaaaacgtaaaaggagtttggaacacaacagaacatacaccgttggaaggttttgttgctgctattactccttttaactttgtggctattgctgccaatctgccttcttctcttttttttatgggaaatgtggttttatggaaacctacggaaagtgccatgttgggtgcct

SEQ ID NO: 4032 - DNA, 358 bp, Cyanidium caldarium
  unsure at all n locations
  Clone ID: LIB190-015-Q1-E1-H9
cccgggtcgacccacgcatccaagaacgcgtgggcggacgcgtgggcggacgcgtaagacggacgcgtgggcggacgcgtgggcggacgcgtgggcgacgtcaccttggggattaccaagtcctctccttttcgggggggtgcactttatggaagcacctgtttaggcggatgaangggagtcaaagggcaacgtggagctaggaaaaggtatactgacagacacgagttggaacttgcccttgtcttcaacgggaagacctgtttctacttccacagtctcggacggtagtttgaaaggcagtgaagctcagcctgaaagttcacattctttttctactattagaacgaagcaacaa

SEQ ID NO: 4033 - DNA, 269 bp, Cyanidium caldarium
  Clone ID: LIB190-016-Q1-E1-A10
cccacgcaaccagaataggacagccaatagcagatggattgaaaaaaatgataaaagagggagtaaagccaacaagagcagagggaatgatgtataaagcagggccagtagtaacatgggggtggtcgatgctaggatggagtgtagtaccggggaggagaacgaaaggtaatagtggatatagaagtgggaataatagcatggatgagtataggatcattgggagtatatggagtagatgaggaaagaaagatcaaggaagtaagact

SEQ ID NO: 4034 - DNA, 389 bp, Cyanidium caldarium
  Clone ID: LIB190-016-Q1-E1-A12
cccacgcgatccagaggtttatgtgccattgcgcaagcagaaagtatgcggtacaagttgttgggtggattggctgtgcgtagagcttgttatggcgtcctacgatttgtgatggaaagcggtgccaaaggctgcgtcgtcactgtaaatggggggttgagagctcagagagccaaaacgatgaagtttacggatggatatatggtgcactcgggacaaccagtcaaggactatgtagacactgcagtgcgccacgtacttatgcgtcaaggagtgctaggtatcaaagttaccatcatgttgccgtatgacccatttttttttaaaggtccttccacaacactgcctgattatgtgcaaatttaccaatcaaatgaatacaaagttcc

SEQ ID NO: 4035 - DNA, 71 bp, Cyanidium caldarium
  unsure at all n locations
  Clone ID: LIB190-016-Q1-E1-A3
tagaggatcaaggccggggtacgggtgcatgagacgtagtagctcggggagantggggcctaaattcaatt

SEQ ID NO: 4036 - DNA, 270 bp, Cyanidium caldarium
  Clone ID: LIB190-016-Q1-E1-A5
cgtcaacccgaagctagttgatcttatgcagtccaagcaaagtaaggctgaaccagtatctgtggaaaaagatttggaagagatggcataaggggtgaaaggccatgcgaagctagggatagccggtaccgctcgaaggcgatataggtagcgtatgcaggaaagaagaaggtaaaggaagagaaggaacaagcagagagggactatgagcgagaaggtggatagtcgagagggaaaaagcccagaagccaagataaggtatcaaagtaa

SEQ ID NO: 4037 - DNA, 193 bp, Cyanidium caldarium
  Clone ID: LIB190-016-Q1-E1-B10
ccacgcgtaccaagcatggctttggcaacatagggacaactaaaaacagtccttattcgcatgaaacctccagtatctcacgtggcttgcacacatgtatggcttggacaacgttgtcaagggggtacgtgcgagtcatcacgatcgtcgccgggggggttacattgccattcctgcacaaatttccaaatgt

SEQ ID NO: 4038 - DNA, 458 bp, Cyanidium caldarium
  Clone ID: LIB190-016-Q1-E1-C11
gacccacgcgaccacggacgcgtccgcccacgcgtccgcccacacgacaaagtatcggtagaacagcctgtgtatgaggttgaaaagaagaccgcagaatatgagataagaaagtaccccaggtggggaatagctgaagttcatcgttcagacgggagggaaagaagaatggctcggcatacgactttgagtcgcaagcatttcgagtgttggcgtcgtacattggtgtatttggagaacccaaaaacaaacatagctccaacacgcatgttaagatagcaatgacagcacctgttttatcacagcccatagggtccgtgtttttttttaatggacgacagcagtctagcgtttatattgcccaaggagtatgcacagcaacaagaacctccacagccattagacccacgagttcacttgcgtattgtacctgtcacaaaaatttcagcgactacttt

SEQ ID NO: 4039 - DNA, 207 bp, Cyanidium caldarium
  unsure at all n locations
  Clone ID: LIB190-016-Q1-E1-D1
caggaaaggttcattttggcgttatatatggtccggcaatcgtacgaggtctttggatttatgcgatcgtaaacctgagganttgggaacgtttggacttatacacaactgtgagtattttagggtactctttagttccaatcgtcatattgtcgttcttgctgttgggtttgtttcttaagaagtcgtccttgttaccttttattt

SEQ ID NO: 4040 - DNA, 379 bp, Cyanidium caldarium
  Clone ID: LIB190-016-Q1-E1-F11
gttgccactatattgcttcaaagagggactgagaatatgatggacgatgttgaacgtgctattgacgatgctgttaacgtatttaaagtgttgacgggggataataggtttcttcctggagctggagggggagagcttgagttggcccgtcagatctcttcgtttggagagaagagccctggtcttgatcagtatgccataaagaaatatgcagagtctttacaagttgttcccacgacgttggctgaaaatgctgggctcaaggcaacggatgtggttagtcctctttatttcttttatacgtcaggacacagcacaactggtattgatattgaagctggaagtaacatgcacgaagacgttgctggtgtatccttgt

SEQ ID NO: 4041 - DNA, 257 bp, Cyanidium caldarium
  Clone ID: LIB190-016-Q1-E1-F5
aatattttcaattggatgaggatccctcggttgccgaatctgaatttcgtttggtcacgaatgctgttgggggggcagggaaacttagggaaacgaacattggggacacgggtttacaaaccttgtcccagttgttgaagaatgtccactcgtcaacttatcaagtccatttctacaagacatatttccagttgatattgaacgatattctcgtggtaccctacagatactttgccaccgcctgtgcgtaaatatca

SEQ ID NO: 4042 - DNA, 366 bp, Cyanidium caldarium
  Clone ID: LIB190-016-Q1-E1-G12
acccacgcatccagcgaacctatcccaacatagtagacaataataagaaaccattctagtatattttaaagcaagatgatacctttatcaaaggattccaacgtccagtaaagagacgacggggctgcacaaatgtcatcatcatcttgagaggggcgtcaatcttgtccaaagagagattgttggccatccaacaccacaaagcagcatttcccaggatagaaacatcgtgggaacagaatggattgaagtcgcgtctctgtttatgatagaaatcatatactgtccgttttatgttgccaaaaatacaaacatttattcttccttagtttgtaaatatatgcaatcaggaggatattcggactc

SEQ ID NO: 4043 - DNA, 430 bp, Cyanidium caldarium
  Clone ID: LIB190-016-Q1-E1-G9
aattcgccgttcgacccacgcaaccagtcggcgtgcgatttgtagaccatccgcacttactatgggttgttctttttgtcggatattcatattctgaagagcatttttcgcatatacgaaaaacttttctatggggggtttttatatgattcctaattcaatggggaggggaaagaatgctgaagagccggttccacgtggaaccaaaggcggttttgtatctgccttgaaaactagtactttgctcttcaaatatagctgtacaatgtcgccaaatttaacttgtacaatatactcaaaaaaacaaacaaaatccaagttcgtaataatctctttattgtactcaaggggccagaaattgatcaacaaaacatgttcaattatcccttaacactacatatcaaccagttgctgatattcaagaattttc

SEQ ID NO: 4044 - DNA, 122 bp, Cyanidium caldarium
  Clone ID: LIB190-017-Q1-E1-A1
tccgggtgacccacgcgtccgctatcgcgtcctctcactcatctgcccacgacgtccaaaaaaggtttcacaaaactcaatacccacatttcaggctgctacaccggtaaaacccctttacc

SEQ ID NO: 4045 - DNA, 325 bp, Cyanidium caldarium
  Clone ID: LIB190-017-Q1-E1-A9
gacgcacgcgtcaacccacaagtccgcatttacgctcattgcaaatgtgtatgcccgagagattctaaattcgacatgaaatccgatagttgaagttcatgtcactacagatctaagtgtgactcggacaactgttccttctagtgcgtcaacaggaggttacgaagctcacaagttgagagataacgacaaatccaggtatcaaggaaacggagttacaactgcaatacagtctgtcaataccgaacttgcaatacctgtgattggtaaggattgtcgagatcagacaccgattgatcgaatgatgatctctttggatggaatt

SEQ ID NO: 4046 - DNA, 339 bp, Cyanidium caldarium
  Clone ID: LIB190-017-Q1-E1-C10
gcgtcagcttatatggagtcacttattcgcagcgaaaaacaacaaatagaaaagcaaaaagaaaagaaacaaatgaaggaagaaagagagttccttatggataaaatatttacactgcagggtggaccaagatcctctccaccaggagaggaggtcacaaagccaagaaaaagagacaagtaaaaagataaaaaagttatcgaaaccaatagtaaaaaaacaaaagacaaaagacaggcgaaggcgacaaaagataaggaacagaatgcaacaagcagttgctatgttgagcagttagacggaataagttttacggatgcaggtaccttcaactttgtt

SEQ ID NO: 4047 - DNA, 351 bp, Cyanidium caldarium
  Clone ID: LIB190-017-Q1-E1-C11
gcgtccgcccacgcgtccgacaagacggtgagtcatccgaagaaactgaaaagcgtcaatgccattcaatgggcaccgcattccgcttcgcatatttgttcggctggagatgatggtcggacgttgatatgggatgtttctgcgattcgagggcctatcgaagaaccgattctctcttatcagtcggataaggaagtgaacaatttgcagtggtcggcagcagatccggattggatagccatagcgacgggtactaaaatgcaaatattgcgagtatgaaagtggtaactttacaaagcaatgttgatgcattgtcgtaatatgacgtaatgatacaaaggcactactaaa

SEQ ID NO: 4048 - DNA, 351 bp, Cyanidium caldarium
  Clone ID: LIB190-017-Q1-E1-D5
cacgcgtcaaagaatgaaacgtcactccagtattcaaaaagaattacctgaattagaacaaaaacttgcgcaaggtgccatatcacctcgaaaagctgccttgactttgttggatatcgtttgtggagggcacattctccaacagacaattaatcagggggcgttccgaacattctttttctctacttgtgaagtattgaggcaattcatatcactacttggatgattatctgtacaacattcttgatcacaattcacttgaattgtcgaatgaacgataccaaaacgctttcgtagtatttcttgagcagttaataaagtgttttttatttcactcgcaaaacaaaaagc

SEQ ID NO: 4049 - DNA, 329 bp, Cyanidium caldarium
  Clone ID: LIB190-017-Q1-E1-E3
gcgtccgccagcacgtccgggcagagaagttgacagagatcaaagaaaaagttgccgataaaataagtgaaatgactggaaacaagtcacctcaggaccaggcgaaggataaagctagcgaggggggggaccgtatgaaggatgcaggaagtgcggggggggaaagtgctcaaaatgcaggggacgccgtcaaggataagatgtccagcatgaaggagtctgtttccaacaaagcggaaggtgtgaaagaaggtctgcaaaagtagatactccgaggttatctcatttgtttcgtcctgtttgtgtttaaataaaaatttggttttttt

SEQ ID NO: 4050 - DNA, 347 bp, Cyanidium caldarium
  Clone ID: LIB190-017-Q1-E1-F10
cgtcaacccacacgtccgtagcagtatggcacccaaaggatccaaaagtgtacccgttgctggaaaaaagcccattggtaaagcagaaaagaaaaaagccaaaaagaagcgtgcagaggcttacagtatttatatttacaaagtgttgaaacaagtccatcctgacactggtatatcttccaaagcaatgagcatcatgaattcctttgtcaatgatatatttgaaaggattgcttccgagtctagcaagctggcagcatactcaaagacaaaaactcttacttcgagagaaattcatattgtttgtacgccttttgttacctggagagttggccaagcacgcagtt

SEQ ID NO: 4051 - DNA, 96 bp, Cyanidium caldarium
  Clone ID: LIB190-017-Q1-E1-H11
atattaattttttaagcttttaacagttttgtaaatatattcacgaaaagctgatacgcgctgattaaatatcaggtttttgaaaacaaacaaact

SEQ ID NO: 4052 - DNA, 256 bp, Cyanidium caldarium
  Clone ID: LIB190-017-Q1-E1-H12
catcaagcgtgagactgcagagagtggaatcgaacaagaacaacaccatggcgagccgatttaactttccatttcttgtttgttgattggccaattcccaacggctcgacgtgttggggtataaatcgtagcgttcgcttcggtgggaggcatgttcagttggttgtagatggaatcgtccatgaataataaaccaagcaccaagccataaaaaaaaattggacataaataaactaaaaatcagaccaaattcaac

SEQ ID NO: 4053 - DNA, 434 bp, Cyanidium caldarium
  Clone ID: LIB190-017-Q1-E1-H8
cacgcgtcaagaatactttatcataaaggccggtggtgaagatgaagttgctcacgtaccactttttacaatgtcccaaaaccaaaacctttcctttgttattggagcctactcaagtagaagcgagagaaacagaatataacaaggaatttagcgtgcgcatgattcctagactagattggaacctggttcgacaagtaagtaaacagtttgcgtttggtgaactgccaccagtagctccccacaacgacacaacggatgaagaaactttacgaatgcttcacaagttgctattggagacgcatatcaaggaaggagttctcattagtcaagatggaactatttatccgataaaagatggcattccaaatatgctcataacacaagtcaaccaagacgagtaaagaaaaatagatatttggtttaaaacaaac

SEQ ID NO: 4054 - DNA, 399 bp, Cyanidium caldarium
  Clone ID: LIB190-018-Q1-E1-A2
tactggtctacgaattcccgggctgacccacgcgtcagcccacgcgtccgattgcccttgtcgtctaacaaagacacacgttaaccttggtccattactactaggaatgacccttcgtaaaccagtctttaccaaagtagagggactacaacccgggacacaggggcacaacgggatcgttcaagtgatgaacgtcggtgaggttatggaaaaagtgagaccgagtggtgacaaactgcaaatcgccgaagtgctacttgcagatgaaactggagcggtattatttacagcaaggaacgaccaaatcaaactttttaaaaagggagagtgtgttaccgttcgaaacgcaaaagtcaatatggtgccaggctttattcctttactagttgacaaatgggg

SEQ ID NO: 4055 - DNA, 383 bp, Cyanidium caldarium
  unsure at all n locations
  Clone ID: LIB190-018-Q1-E1-A4
tactggtctagaattcccnggctgacccacgcgtcaacagtctacttcattttattgcttgtcgtaaaaacttctggtacctatgcttctcctttattccatacttatcgttcctcctcgaacgatacgattgctgcagagggggacaagatgaaaaacttcacaactctgtgcagtctacccaaaattgccaatctgactagtacttttgaaaacgcttctcttgcagttacgctctttgcaccaacacacagcggaatctcttcaacactcaaagcagtgaatatttcggcaagccccatatacaaaaacaccactctggtaaatatttttttctagtatcatgtcctacctgagccattaaagacttccaaattctccgc

SEQ ID NO: 4056 - DNA, 374 bp, Cyanidium caldarium
  Clone ID: LIB190-018-Q1-E1-B2
aattccgggccgacccacgcgtcagcccacgcgtccgagagagagaagaaagaaaagaagagaaaagccgtactgaagaccgacacaggtactcgaggagaaaggagacccaaattaaggtgagagaatgggcgataaggaactaggcaaaaggatatgggggctgcggtagaacatatgaaagaagcagcaccgactgtttagcaaaaacacagcactctgcagaaaagagaaaatgtaaagtatagagtgtgcggcctgccaaatagtagagaagaaatcgatgaaagtgaaagcgagtaaaagatgaggtatagataatggcggtcctaacggtaaggatccaaaggtagcgaagtaaatagacgtttgaa

SEQ ID NO: 4057 - DNA, 268 bp, Cyanidium caldarium
  Clone ID: LIB190-018-Q1-E1-B3
acccacgcgtcagcccacgcgtccggagaaaagaaaaacaaataaaaggagtactacaaggagcgaacataatgggagcaggaatggcaacgatacgtttaccacgagtacgagcacgggtggcaataatatttggaagtttgatgaagggggatgcaaggaacccactattgaaccaacacttatttggatacacgatattaaggtttgcgttaacacacgcagtacgactgtttgcattcatgatcacttttttaccactgttttc

SEQ ID NO: 4058 - DNA, 393 bp, Cyanidium caldarium
  Clone ID: LIB190-018-Q1-E1-B4
ttcccgggccgacccacgcgtcagcgtcgattgacagagtccaagtctcaagtaacacatgaatattgtcaaattcaatgtcaactcgataaggtattagagttgcggaatatttggaagaaggaaagggagtgtgtctatttccgtaaatgattttgtgggtcgagctactgcacttgcattgagacgagtaccagagttgaatatcgtttgggatgaagcaagccaaagtgggaaacgaatggaacgagtcgatatttctatggcagttagtattgaaaatggcttgatcacaccaattataacggacgcggatattttatgaatagaagaaatttcacatacagccaaagagctcattatgaaagcacggcaaggcaaactgaaacctga

SEQ ID NO: 4059 - DNA, 412 bp, Cyanidium caldarium
  Clone ID: LIB190-018-Q1-E1-C2
tactggtctagaattcccgggccgacccacgcgtcagaccaactgttatgaggacgacgactatcgaagacgacctgttgcctttcaaagtatttcgtctgtcttgttccaccgcacaccacaagtattcatatcgaaagggggagttggcaccgttgcacgtattccttcgggtcctctttgtgctagtgggaaatatagtctccgatatagacaccaattcatagcaactcctttatggtctactcgtttcaaaactgggaaaagagatgagcgctacaaaagtatcaagtaacgtcgggagcgttggaagacaagacagaggatggatgtatcgacaattctatggacacagtcaactcagagcagtcgaaaataacgaccgaggaagacggttccacagagtccccat

SEQ ID NO: 4060 - DNA, 390 bp, Cyanidium caldarium
  Clone ID: LIB190-018-Q1-E1-C4
ttcccgggccgacccacgcgtcagaccacgcgtccgcccacgcgtccgcgatcgataatattctgatggcacttttcttgaataatagcggcggtgcatgggacaatgccaagaagtatattgaaacaggtgcatatggtggaaaaggttccgaggctcggggggctagtgttactggagatactgtgggtgatccttttaaagatactgcatggccttccttacatgtcttggttaaattactatccaccctcacactggtgtttggtccgctgttcttgacttctgcgggaatagaagtcatttccggctattttttattaccttacatatcttcttcgtgtctctcttgtgcttttgtttatagcagcattaaaccatattgttttt

SEQ ID NO: 4061 - DNA, 362 bp, Cyanidium caldarium
  Clone ID: LIB190-018-Q1-E1-D12
acccacgcgtcagagaaagaggcaaatacgggaaagcagtaaaagaagaaagagaaaggaaaaaaactgagtatcaggaagaaaagagggagtacatgaggaaagaaagatcagggaagggagagtaagagaaggagtaatgtgaatgagagcaggaaagtatttgaagaagagagtgtaaagcgcgtaccttttgcataatgtcccagcgagtgaaagaggaagcaaaaagaaagaaaaagaagtagccaggtaagacccgaagctagttgatcttatgctgtccaagcgaagtaaggctgatccattatctgtggaaaaagatttggaagagatggcacaaggggtgaaacgccaatcaa

SEQ ID NO: 4062 - DNA, 387 bp, Cyanidium caldarium
  Clone ID: LIB190-018-Q1-E1-D2
aattcccgggccgacccacgcgtcagcccacgcgtccgagaaattgctggacttggaaatataaacgaggagagtcaaggagacttgtgagcctatttggaaagcaaaaaaaagacaaagtcaccactccagacctaagttctctttgttggtggcggaggcggtggtggtggagcaggagaagctgctttggttccattctgtaaggcaccacttttcggaagaggaggaggaggaggtggtggtggaagtgttgttgttgttgtagctgcactatttacattctgtttatccgccaggccgtcaggttgcggtgaattattagttactgttgttgttgttgttgtagctgcactatttacattctgtttatccgcctggccgtca

SEQ ID NO: 4063 - DNA, 394 bp, Cyanidium caldarium
  Clone ID: LIB190-018-Q1-E1-D3
aattcccgggccgacccacgcgtcaggttttacttcttaccgtgaaagggcatggaaaaacgtatacagaaaaagttacttttattgtaagagatgctgcgcaacccgaacacgaaagccttcaagaagaggaatcggatgaaaattgcatcgtgcttgaggggcattttccaaagaatgaagcccaacaggctgctgaactcgtgtcaccatcgacttgagtcgagcttgaacaaacaacaaggaagaaataacgtcaactccaacaactggtgagactattattattatgtttggaagaaagagaaacaaaatgcttatctctcgtcaatatctcgatgacctattcattcttcctttgttttcctctcttttgtgctgcaatatatagtac

SEQ ID NO: 4064 - DNA, 360 bp, Cyanidium caldarium
  Clone ID: LIB190-018-Q1-E1-D4
attccggccgacccacgcgtcagcccacgcgtccgcccacgcgtccggaaaagacatactgaagaccgacacaggtactcgaggagaaaggagacccaaattaaggtgagagaatggacgataaggagggaggcaaaaggatatggtatctgcggtaggggatatgaaagaagcagcaccgactgtttagcaaaaacacagcactctgcagaaaagagaaaatgtaaagtatacagtgtgcggcctgccaaatagtagagaagaaatcgatgaaagtgaaagcgactaaaagatgaggtatacagaatggcggtccttttattaaggatccaaaggtatcgaagtaaatagacgtttgaa

SEQ ID NO: 4065 - DNA, 395 bp, Cyanidium caldarium
  Clone ID: LIB190-018-Q1-E1-E1
cgtactggtctaggattccgggccgacccacgcgtcagcccacgcgtccgcggacgcgtgggcccacaagtccgcccacgcgtccggaggcaaatacgggaaagcagtaaaagaagaaagagaaaggaaaaaactgagtatcaggaagaaaagagggagtagatgaggaaagagggatcaaggaagtaagagtaagagaaggagtaatgtgaatgaaagcaggaaagtatttgaagaagagagtgtaaagcgcgtaccttttgcataatgtcccaccgagtgaaagaggaagcaaaaagaaagaaaaagaagtagccaggtaagacccgaatctatttgatcttatgctgtccaagcgaactaaggctgaaccagtatctgtggaaaaagatttg

SEQ ID NO: 4066 - DNA, 295 bp, Cyanidium caldarium
  Clone ID: LIB190-018-Q1-E1-E11
acccacgcgtcaacggacgcgtgggcggacgcgtggggtttttaaaacggaataaatttttttatttttgcttgtaaagacaaactgttgtgaattctatacgttggtattagggtgggacctctctcgttattaaaagctgggcaggggcaaccagtgttggttgaactgaaaagtggagacacttacaatggtcacttggtgaacattgactcctggatgaacttgaacttgagagacgtagtttggacttcacgtgaaggcgaccgtttttggaaaattgctgaaatttatg

SEQ ID NO: 4067 - DNA, 390 bp, Cyanidium caldarium
  Clone ID: LIB190-018-Q1-E1-E4
attccgggccgacccacgcgtcaggtccctcgtccctcgtcgtctcctccaacaagtaccaaaacataaaatagaaaatggcaactttactatccaaaaaaagaagagcagtagccgacggtgttttcagggcagaacttaacgagtttctgatgcgagaggtgtcggaagagggatactctggtgtagaagtgaaacccacgccgttgcgaacggaaatcgtgatccgagctaccagaacacaaaacgtgttgggagaaaaaggtcgaaggattagagaactcactgcgttggtacagaagcgattccgttttcctgattgaacagtggaactttatgcggaaaaggttgcggatagaggtttatgtgccattgcgcaagcacaaagtt

SEQ ID NO: 4068 - DNA, 98 bp, Cyanidium caldarium
  Clone ID: LIB190-018-Q1-E1-E9
caaaggatccaagcttcactacgcgtgcatgccacttcatagctcttctaaactttcacctaaattcaactcactgttctttttttctttttcttctc

SEQ ID NO: 4069 - DNA, 350 bp, Cyanidium caldarium
  Clone ID: LIB190-018-Q1-E1-F11
acccaagcgtcaacaattgttcattccaccatactctactcctatggatcctaaatgcgaaaattgtcataaagcagtgtatatggccgagaaagtgaccgttgatgaaaacagggcaggtcacatgggttgctttcgttgttcaacttgcaaagtgaaacttagcctcggaaattacacactgttagatggagttctcttttgcaagccgcactttcatgaagcatttctttctgctggaacatatcgagcaccggacaacaccaaaaagaatatcgaggaagcttcaactaatgagactgattattgtgttgcgtcacaaacaagtcaaatattatcatctcaaactg

SEQ ID NO: 4070 - DNA, 383 bp, Cyanidium caldarium
  Clone ID: LIB190-018-Q1-E1-F12
ccgggccgacccacgcgtcagcccacgcgtccgagcagcttctgtgttgtatcatgtgcaggaacacgagtcaccagcccgatctttcactattacctcgaggggaactcttcttctggaaaaaagtcaaggttccgctcgtggaatagtgttgtgtgaggcaagttttgaacatcgcagttgttggatgcacttggaaaagtgtttaaagacaggaaacaaggtagttcgagatgtatttggagaggataactattttgatgcttttgcaaaagaaaactcgcaacacaaagagtttttaaaagtctttcattaagggatggcttccgtgagcgagttcgacacgcgatccatcctttatagttttgacttttcaaagtttc

SEQ ID NO: 4071 - DNA, 264 bp, Cyanidium caldarium
  Clone ID: LIB190-018-Q1-E1-F3
taccggtctagaattcccgggccgacccacgcgtcagaacgaggtcggcgaggttttcgaacgattagcaaggttatatggaccgtttagaaaccttataaacaggaaaacaagagcgttttcctgtgaaacaaccaaaaagggaaagtactaagtaatactaacagtactggggcacttaaccttgggaaaagacttgttgtacttttgtggttgttattgcttgcgcctacgtgagaaatgaccggagccaacgacaaaacc

SEQ ID NO: 4072 - DNA, 455 bp, Cyanidium caldarium
  Clone ID: LIB190-018-Q1-E1-F5
ccacgcgtccgtaggcctttgtcgtcgtcgttacggtttacgattgataatgcggtttggatatggcagacccccaaactgaaagagcgtttcaaaaacaggacgctatatctttaaagcagatcgcgggagtatccaaaaagaatgcaagatggtaggggaatattgggttaggaatcaaaacacccaaggaagccatagagggagaatatatagacaaaaagtgcccttttacgggaaacgtgagtattcggggaagaattttgagaggaacagtggtttcaacgaaaatgaagaggactgttatcgttcgaagagactatcttcactgggttcgcaagtacagacgatttgaaaagagacacaggaatattccagcacattgctctccttgctttcgcgtgagagaacgagacgttggtaccattggagaatttccgccgttatccaagaca

SEQ ID NO: 4073 - DNA, 388 bp, Cyanidium caldarium
  Clone ID: LIB190-018-Q1-E1-G1
attcccgggctgacccacgcgtcagaaactttgcactcacacattgaagagcaaaaaaataggatgaagaacttgatacagggtcagatcgaggagcatgaaaagattctgtttcaattagaagacgctgggagtcttttgcgttccatggaacgtgatgggaataaggccctccttgaagtgcaagatcgcataagaaatgcaacaaaaatttgtgattcctggaaagaaatcaaaactgccttggaccaaggactgaaattttatcacacggcactaacaattgccacgcaactgaaaaataatgttgaaactattttttaataattccagttactgagacttagaacatgtatatagctaaaaaaatggattgtttatccggatt

SEQ ID NO: 4074 - DNA, 382 bp, Cyanidium caldarium
  Clone ID: LIB190-018-Q1-E1-G12
ctcccgggccgacccacgcgtcaggtgctcagtcagaactgcttctcagttagatacgcaatatgcctagtcataaggaacaaaataaaggaattaaaatatcagctgacggttacgcactagggttgggcggtattcggttggacgtacacggcagttgggtcactatggtggacgcagacgacctcagagccctcatgtttaaggaaagcctcaaggaaaagtcaaagctgcatgacccaaaatttttcaaaagctattatgaggagaataaggactacttttattatatgactcatacggagaataaaatgtttctttccccggaagttgcacgagaatacgctactctggtgggaaactcgtttctgcacaaatattt

SEQ ID NO: 4075 - DNA, 384 bp, Cyanidium caldarium
  Clone ID: LIB190-018-Q1-E1-G2
aattccgggccgacccacgcgtcagcaacatgtcttttttgaaacgtatacagtcaaacctgctttccaacagaaactcagtaacaaagacaagtaaggccaattacgacataaagcacgttcgagtttggggctgggaccctgaaaagggagaagaaccgggattggttacctactcgattcctctcaaagaatgcggtcccatggtgttggatgccttattcaaaataaagaatgaagtggactctacttttgtatttagaaggtcgtgccgagagggaatttgtggaagttgtgcgatgaatatagatggaaataatcgtctggcttgtttaactccgttagcaggaccgaagcagacagtgactgtatatcctttacctt

SEQ ID NO: 4076 - DNA, 371 bp, Cyanidium caldarium
  Clone ID: LIB190-018-Q1-E1-G4
attccgggccgacccacgcgtcagacagtgtgtcgtaaagggtctgagctttacaaatctgcatatgcaaagctcagtcgcaatttctactgttcatggaggaagattcacgcaacagtaacgtctttggccgactggacggaaacaagtttcggagaggggctttattgggtgcaaaaggggtcgggaagtcatccattgctacccgctttgcagaagacacctttttggactcgtaccttccaaccatacaggattcctatcacgcgacttgcagacacaaaaacgaaacttacaacttggagatattggacactgttggacaggacgaatattcctatctcggaacacagctgactatcggagtacat

SEQ ID NO: 4077 - DNA, 395 bp, Cyanidium caldarium
  Clone ID: LIB190-018-Q1-E1-H1
taccggtctagaattcccgggccgacccacgcgtcaggaatcctgcaaaggccaactgaaagcgcccatatagttgttattctctactgtttgttgtcccttgttttaagtgaacaacaggaaactccttctttaccttccgggacgttgactagtgcggctgaagtgttcagggaagatgcacctcacccgttgagtagaaaccttccttcttccaaagagatagaagtagcatattcttttagtgttgcaacggatgaaaaaagtatacagcctgggactctggtagattgtttagttggagtggcaaatggaggaccttttccatatcgaatattagcagttggtggagctttgcactcccctttgcagtttaactattatgttcaaaactt

SEQ ID NO: 4078 - DNA, 323 bp, Cyanidium caldarium
  Clone ID: LIB190-018-Q1-E1-H10
gtcagcgctgttggtcacttgtagaatgacttgtaacacatgagccaaatgccataataaatgtcactgtgcttgactcgttctaccttatttatgtagtattcggagcgggcagcagtggtacaaacgtgaaggataggggtccctcgccgtcgtggcaacagaatgtggttttgtgaggttttgtagtgttagttgttgtataaaagaattggaatagaataaaatatgtttcgcgcctattcttctacaacaaacgactaaacaactaacactgaaaaaaaaaatttttttttttttttcgctctacaggatccaacctt

SEQ ID NO: 4079 - DNA, 342 bp, Cyanidium caldarium
  Clone ID: LIB190-018-Q1-E1-H3
ttcccgggctgacccacgcgtcaggattcgtcgcaagtctttgaaaaaaagacaaaaaagttcaaacgtttccagtcggataggtttaaaagagtcaaggaaagctggaggaaaccaaagggaatcgagggcagagtgcgtatgcggttcaaaggttcggggttgatgcccaagatcgggtatgggacagataacagaacgagacacttgttgccaaacggtttccacaagtttgtactaaataatgtgaaagaattggacgctctacttatcttgaaccgcaaatatccaccacaaatagcgcacggagtatcttcttttaagatgaacgaaattttggaa

SEQ ID NO: 4080 - DNA, 390 bp, Cyanidium caldarium
  Clone ID: LIB190-018-Q1-E1-H4
atcccgggccgacccacgcgtcagcccacgcgtccgggagcaccttgaccgccattggcatataccttactcgagttacttgactgtaagtgatattgttgtagctcttttgcgttatagaggtcagcgagacagaggagcaagggcgagaaacttaggggcaagcgagagaaccttcaacgcttggcttcgttcaggtttaggagccatggctttaggaacaatagcctctagatatatgtatacagcagttggcaaggctgcagctattttgttattctgtcttggtgttctcattattttgtactgtttggtccgacattatcatatagttttccaagtagaggaagacattttgtattccactactgttcttcctagaacattttc

SEQ ID NO: 4081 - DNA, 386 bp, Cyanidium caldarium
  Clone ID: LIB190-018-Q1-E1-H7
ccacgcgaccgaaagagagaaagagaaagagagcgcactgcacagcttaagatgacgacgaggtggtggaaagtaacctcttcgttattgcgtttatcaactcgagttaccacacttcggacctctgtgtgccaactcttatccgaaagcaagtttgaggcatttgaatacttccaacttaaagttgagtgaagaaaaggaaactttccactttatgccactgtcttacaacgaagatgtgagggcagtttcaggtatatatgcacctgatgaacctcctcaggctccactacctttagattatgagttgaacggggaatgtgacttttctatacagttggatatgcacgaggacgtttctgatagagaagcagctatatgagttg

SEQ ID NO: 4082 - DNA, 375 bp, Cyanidium caldarium
  Clone ID: LIB190-018-Q1-E1-H9
acccacgcgtcagcacgacacagaatggatacttttttaatatatgactccaccagtcaacgattcggtgtagctgctgaacacgtttatgacgtaaacgaaaataccaagttgcgttggggtgggaaagttcgtcacggagaatcgggggcggcaggatatgtcattgccgaatatgactttacggtttccaaagaagattttccgataaacgttcgtgcacgtgcgatatgtaaaagtaaccagtgcatcggcgatattcgtgccaaaaagaagtttgaagtggacgaagacacttctttattcttcttagccaaagcttgtactcaggaactaacaaaaggaagttatattattggtaaaacctgagtgaca

SEQ ID NO: 4083 - DNA, 358 bp, Cyanidium caldarium
  Clone ID: LIB190-019-Q1-E1-A1
taccggtcaggaattcccgggccgacccacgcgtcagcctctccaagaaggtgttgcacggctgtcgaaagaacgtgctgtgaagtgagagaacgtacgagaaagccaagtgaggaaaagaaggcaagtagagggcggcccgagaaaaaagagggcgtaagacgtgatacagagtaggaagaaaagagaagagagctagaaaggaggtaaaagaagagtaaaaggactagaagaggtacggaattcacgaagaaggagcgtgaaggaaggaggaatcccaagtaatcgaggaagaaaaagcttcggtgaaagcgtgaacggattttgtacacactgcccgtcaagttctggaagtgtg

SEQ ID NO: 4084 - DNA, 314 bp, Cyanidium caldarium
  Clone ID: LIB190-019-Q1-E1-A4
acccacgcgtccaccttaattaacaatccaaaaaaaaaaaaaaaaaaaaaaaaaaaaaaaaaaaaggaaaaaaaaaaaaaaaaaaaaaaaaaaaaaaaaaaaaagggaagacgctccaaaggtcttaaacattacgtaacccatcaagaaaaaataagaatttcttcaaaatggtacctaaaattaaattccctgggcgttcttttaaaaaaaaaggggggggaccccccaggtttttaccctaatttaacccttttgcaaaaaattcacccttttcaaaaggggcctaaaaatcaaatttccgggcccttttt

SEQ ID NO: 4085 - DNA, 403 bp, Cyanidium caldarium
  Clone ID: LIB190-019-Q1-E1-A6
ggtaccggtcaggaattcccgggccgacccacgcgtcagatcttgtccaagtgagaatggcggcaaagaatgaaaactcttgttgtatgcttttgcaagtgaagagactaagcaaggacgctgttgtacctcaaagaggttcgaaacttgctgcaggttatgacatttgttcctcggaagactgtattgtaccagctcgaagtcggtactgtgttaaaactgacttggcagtggcgattccctcgggacactatggaagaatagcacccagatcaggacttgccttaaagcatggaatcgacgtaggagctggtgttatagatgaggactatcgaagaagcctcggtattattttagttaatcattccgaagaggatttccatatatccaagggaaatcgaat

SEQ ID NO: 4086 - DNA, 345 bp, Cyanidium caldarium
  Clone ID: LIB190-019-Q1-E1-A9
caaaaagagtcaacccttcacttggtattgcgtttgaggggtggaatgcagatatttgtgaagacacttacaggcaagaccattactcttgaagtggagccttcagacactattgagaacgtcaagtccaagatacaagataaggaaggaatccctccagaccagcaacgtttgatatttgctggaaagcaactggaagatggtcgtactctttcagactataatattcaaaaggagtctacccttcacttggtattgcgtctgaggggtggttgctaaatatttcagcaagtagtttagtttagcccttattttctgaataaatattcgcagttcttgtcaaaa

SEQ ID NO: 4087 - DNA, 394 bp, Cyanidium caldarium
  Clone ID: LIB190-019-Q1-E1-B2
ggtcaggaaatcccgggtcgacccagcgtcggccaacccttcggccaaccgttcggcaaaaaaatggcaaggaggttgggttccttaaaatcagttaaggaatttgccttggtctaattcctgtgcttatatcgttgccgctatttttgtgcatgtttcaggaaattggcgctatatgctcgggagtactttggtattttcatctatattactgatagccatgcttacattacccgaaacccctcgttggctgatgagaaaaggaagagaggggcagtcctataaagtatggagtattgtgcgaggatttgatactgaagaagaaagacaggagttttttgtgatgagaaagacggtggaacgggagttggaagagtctaaaaacagatatgtc

SEQ ID NO: 4088 - DNA, 416 bp, Cyanidium caldarium
  unsure at all n locations
  Clone ID: LIB190-019-Q1-E1-B3
taacaggatgcattggcgaatcagaaaatagtttgcgaaaaaatgttcgtgtcctactccgttaccgcaaaaaacttacgggcttggcacgtacctttccaaagtccgtcccccgaggagtggtctgagagggggatgtttacgaaatgtgaaattttcaaccacanacgacctgcaaagttgttatctacgaaaatgagaggaggcgaccatgaaaggagagaacttagtcgtcctatgcgtacgcttgattccgctttcgacgaacttttagcttttgcgcaggatccctggtccatgtttcgctctccatggagtctgtcgcccagaagtatggcagtagacacgtggatgcctcgtgttgacttggtggagaaaggaagatggcttttatgcatacgtggaactaccaggac

SEQ ID NO: 4089 - DNA, 399 bp, Cyanidium caldarium
  Clone ID: LIB190-019-Q1-E1-B4
ggtcaggaattcccgggtcaaccaagccttcaaacggaattcacaaggaaggaccttgaaggaaggaggaatcccaattaaccaaggaagaaaaaccttcggtgaaagcgtgaacggattttgtacacactgcccgtcaagttctggaagtgtgctaggaatgtgaggaaaagaaggcaagtagagggcggcccgagaaaggagagggcgtaagacgtgatacagagtaggaagaaaagagaagagagctagaaaggaggtaaaagaaggtgttgcacggctgtcgaaagaacgtgctgtgaagtgagagaacgtacgagaaagccaagtgaggaaaagaaggcaagtagagggcggcccgagaaaggagagggcgtaagacgtgatacagagtacaaa

SEQ ID NO: 4090 - DNA, 392 bp, Cyanidium caldarium
  Clone ID: LIB190-019-Q1-E1-B7
ccgggccgacccaagcgtcaggcatgttatgcactttgttgtcaagcaaaactgggtcacgtaataaaaatatgtagacacggggatcgttcgccactgaacacttatcccaacgatccaaaaccttaccatctctggccaggaggccctggacagttgacagctgacggaatgagagctcatttcgaacttggcaggcaacttcgccgacgatacgtagattcagggtttcttgaccaaaatctgtccgtcaacgaggtagcttcagctccttgctgtgaagccgtcccatctgatatttttatggttgctataggttaaagttgtatccagcgataccgatcgtactctcatgagtgcttattgtcagatggctggcttaattccctatg

SEQ ID NO: 4091 - DNA, 382 bp, Cyanidium caldarium
  Clone ID: LIB190-019-Q1-E1-C1
tttttcaaggcaacaagaatgcaccttttattaagccaatgtggaaactatcttttcaggaaccttgtcttcttttggttcgtaaatctgcacataatcaggcagtggtttcgaaggacctctttttccttctgggtcatacggcaacatgatggtaactttgatacctagcactccttgacgcataagtacgtggcgcactgcagtgtctacatagtccttgactggttgtcccgagtgcaccatatatccatccgtaaacttcatcgttttggctctctgagctctcaacaaaccactcacagtgacgacgcagcccttggcaccgctttccatcacaaatcgtaggacgccataacaagctctacgcacagccaatcca

SEQ ID NO: 4092 - DNA, 84 bp, Cyanidium caldarium
  Clone ID: LIB190-019-Q1-E1-C2
cgggtcgaaccacgcgtccgtataaagtgctgggcctggaaaagaacgcttccgagagagaaattaagcccgcgtaccaacaac

SEQ ID NO: 4093 - DNA, 453 bp, Cyanidium caldarium
  unsure at all n locations
  Clone ID: LIB190-019-Q1-E1-D3
ggtcaggaatacccgggccgacccacgcgtcagcccacgcgtccgaccgtcctgaatttgaaaatatttactcatttttacaggacaagaggttaccattgtctaatattaaggaatccttgaagaggcaacgagtacaagatgacgaacacgacgaaggtttgggtgaggatgaggatttagatgaagaagaagaagaggaagatgaagattttgatcccaacaagaaggaagaaagtgatcaggaagaaggtggtggctctgcacagagtgatgaagaaatgtcagagaagagtgaccaagaagaaggcgatgactagatcatattcttgttggtaaactgtatttcaatattctctggcgacatggaaatattacgaaacattgtctatcgataaatacgttgccagatgagaaacaantctaaacttcaagaaacacatgttgaaaacc

SEQ ID NO: 4094 - DNA, 405 bp, Cyanidium caldarium
  Clone ID: LIB190-019-Q1-E1-D5
aattcccgggtcgacccaagcgtccgagtcattccaccaggagagtaaaagcaagaaagaagagagaaagaaacaccacgaaatggacagaaaatgttttttctacaactgctcacagataaacgaactttctggtagaaaaaaaaaaaaaaaaaaaaaaaaaaaaaaaaaaaaaaaaaaaaaaaaaaaaaaaaaaaaaaaaaaaaaaaaaaaaaaaaaaaaaaaaaaaaaaaaaaaaaaaaaaaaaaaaaaaaaaaaaaaaaaaaaaaaaaaaaaaaaaaaaaagggggggccgcccaaaaggttcaaagtttgtttaccctttaagggaatgtaaaacaccttcaaaagatgcccccaaatttaaaaaagcgggccattgttaaaaaactctggtacggaaaa

SEQ ID NO: 4095 - DNA, 431 bp, Cyanidium caldarium
  Clone ID: LIB190-019-Q1-E1-F1
ggtctagaattcccgggccgacccacgcgtcagcgtttattgttgctgcataatgagatggaagattggcgagtatcggtagacggagttgaccattggattcctctttattttcaacaggaggaaaccttccttttgaagctggatttgcccatcgttactggttcggcgtttttaggctttgttcttttggttatgagtttcacctgtatgaatattactattccaccttacaacagtccacagatcatcaagatttgggcagtattcataagcattttgggctttttgttgcttttatccttttcttccatgttttactggatgcgaaaaaatgctcctcgaacggacttatagatgcttatcgatggagctttccgcggtgtaatgactttgaataataaagttgggttgcttccatttattacgat

SEQ ID NO: 4096 - DNA, 413 bp, Cyanidium caldarium
  Clone ID: LIB190-019-Q1-E1-G4
ggtcaggaatacgcgggtcgagccacgcgtccgcccacgcgtccggtcggtttatggtttcttcgagtgttggcggcaaacgacgagttcaaggttgtggttgcgtaacctcgtgtcgacctctattgttttctttttctttttcgtccaacgggaggaaaacgattactgctttgtaaccaagcagctagtcactacaacaggacagggtttttgggaatatgtaaatatgaaagatggttgtgttgtccatgtcgttgtccccaacaacaacaacagcaacattggttacctttttatccctattactattagtattactacaaagagaatcctatcgataactggataataacgagtaatacgaaaaagagacaatggattggtacccgacaacgaatattacccatact

SEQ ID NO: 4097 - DNA, 460 bp, Cyanidium caldarium
  Clone ID: LIB190-019-Q1-E1-G6
ggtcagggtcaggaggtcccgggtcgacgcacgcgtacgggaaatgcccttttatgagttgttctgtttgtttcgtacagacgatgccaagaaatgagttatttcaagcagtagagaaaacagctgaacagtcatatggatgcagaaggtgtcatggcgaatattgatcctctagcctctacagaactggcctatgacatcatccgaaagggagttcggtatgagtcggcacactttatccaataccgagtttttgcacctgcaaatagcatttacgatttggttttaaaattaaagtatgacccctccatcttgaggttcaagtttctgagacggcgactggaggacgctgttgatcattctaatccttttgaaagaattcttccacgtcgaagcttgccaagaacagatcctgcctttagtttggatcggttcgtacatgatctccatgaaaaggaac

SEQ ID NO: 4098 - DNA, 75 bp, Cyanidium caldarium
  Clone ID: LIB190-019-Q1-E1-G7
cagaggatcaaagcatatgtacgcgtgtatgcgaagtcatagctcttctacagatgtcgcctaaattcaaatgaa

SEQ ID NO: 4099 - DNA, 329 bp, Cyanidium caldarium
  Clone ID: LIB190-019-Q1-E1-G8
ggtcaggaatacgcggtcccaggcacacgtacgcgtacgcgtcagggcggatcatggtctcatcaatctgtaggtggcaaattattgagttcatcaggtgctgcattacttaacctcgagtcgacctcaagtgtggtcatggtctatgacactagtcgaaggatgatgacaaaagtgttgtaacaaatcaagtagccactataacaagacagggtttttgggaacattgtgataagacagatggatgtgttactatgtcgaaggtcctctcattcaaattataagcatagattagcgttttatcgcaattacaacatactataaataca

SEQ ID NO: 4100 - DNA, 352 bp, Cyanidium caldarium
  unsure at all n locations
  Clone ID: LIB190-019-Q1-E1-H5
cccacgcgtccgcccacgcgtccgggaaaagaaggcaagtagagggcggcccgagaaaggagagggcgtaagacgtgatacagagtaggaagaaaagagaagagagctagaaaggaggtaaaagaagagtaaaaggactagaagaggtacggaattcacgaggaaggagcgtgaaggaaggaggaatcccaagtaatcgaggaagaaaaagcttcggtgaaagcgtgaacggattttgtacacactgcccgtcaagttctggaagtgtgctaggaataagcaggagaagtagaagagagtaggaaaagaagaaaggaagtgaagacgtaagacgtgaaaaaaaaaanaaaaa

SEQ ID NO: 4101 - DNA, 462 bp, Cyanidium caldarium
  Clone ID: LIB190-019-Q1-E1-H6
taacggtcaggaattcccgggccgacccacgcgtcagacagatattgagcttttggaagataacacaatgaggagtttggttcagcaatatgccaatgaccaacagcaattctttaatgacttttctgaggtgtttggaaaatatatttctagaattcattgcaatcaaacttccacaggaccttgtccgttggatgacatcggtgtacccacgtctgctgctccatcaccgcagtcggctgttccttcattttcggaacctagtttcgggcctccttctggacctagttttccaacttttgatggtgagccctcagctccatcatcattttctcccttcggaagcagcagtggacctgaatttttcccgatttaaatagtacagaaccaagtttagggtagtgtacaactccaaagggggttggttagtaaagcccacaaaaaggtttccaagctttcgag

SEQ ID NO: 4102 - DNA, 151 bp, Cyanidium caldarium
  Clone ID: LIB190-019-Q1-E1-H7
cggacgcgtgggaaaaaaaaaaaaaaaaaaaaaaaaaaaaaaaaaaaaaaaaaaaaaaaaaaaagggaggaagaacaaaaagataaaaagcttaaataagcatgaatgaaaaggtgaagaggtcttcgaaaatgtcacctatgggtcagtt

SEQ ID NO: 4103 - DNA, 403 bp, Cyanidium caldarium
  Clone ID: LIB190-020-Q1-E1-A3
tattcattatatgatgagctttgaacaaaattggaatcctattcgatgcgtatttcgattggctatttcatggagcagacttcaatataattgctggaaacaggtttctaaaggtctcaactcatgtctaatgacagtgcaacctattcttgatcgttgttgcccttcatcggattccagtaatacccaacgattattggaaactttggtacaggatttcatcgtggaaaccaaaaatatggatgagtttgctacaagctggttggtattgacagaaaaggaaaacttagattgtattcaattcgatactttcaaaggacctttaggattttcaacgagtgaatttcctaatgatccttttgaagacactttattgtcgatacgtaagactttattggagttg

SEQ ID NO: 4104 - DNA, 193 bp, Cyanidium caldarium
  Clone ID: LIB190-020-Q1-E1-B12
aatgatcgagctttgaacaacagagtgattattactgctggttacagtggagagattcgaatatatgaagatgtggtgcaactataatctacatacatgacagaatgcgtttcaatggcatataccgaagatacggaagtttcaagctgactttgttcacaataatcattcaatcaatatttgatgcaaaagc

SEQ ID NO: 4105 - DNA, 355 bp, Cyanidium caldarium
  Clone ID: LIB190-020-Q1-E1-B5
cgactgtttagcaaaaacacagcactctgcagaaaagagaaaatgtaaagtatagagtgtgcggcccgagaaaggagagggcgtaagacgtgatacagagtaggaagaaaagagaagagagctagaaaggaggtaaaagaagagtaaaaggactagaagaggtacggaattcacgaggaaggagcgtgaaggaaggaggaatcccaagtaatcgaggaagaaaaagcttcggtgaaagcgtgaacggattttgtacacactgcccgtcaagttctggaagtgtgctaggaataagcaggagaagtagaagagagtaggaaaagaagaaaggaagtgaagacgtaagacgtgaaaa

SEQ ID NO: 4106 - DNA, 234 bp, Cyanidium caldarium
  Clone ID: LIB190-020-Q1-E1-C3
tgatttacgaagtgcacagtgcctactatcaaacctttttgactgtttctggaaagtcagctaatcggtcttccgggttggataagaaaacgtgggatgccatacgtagtgaagtagagatgcaagttggttagtctgttgtagatgtgttttttcgtgtgcaagtaaaggtttttttgtttgcgtgtcgaaaaaaaaaacaaaaaaaaaaaaaaaaaaagaaaaaaaaataaa

SEQ ID NO: 4107 - DNA, 392 bp, Cyanidium caldarium
  Clone ID: LIB190-020-Q1-E1-D6
cccacgcgtccgtacaagagtaatggataagtattcacattttcatccatggtcttatcgaagagacaagagtcgtttctctttgttttttggtggcaatggtcggtaaaaacttgtaggtggttgtggttgttgttgcgtattatcttggtatttcttgttggaacctaccaccaactagtataagcattgttttcatctacaacaacaacatcaacggtaggataaaacttacctctgtaatatccgacaatggagttcgcctaggaagcgttgtcttgtcctttttagaacttgtccttggtttatctgttggtgtgcaatggtctacattttccttttccaattgccaccattcaagtgattgagaagcgctgtacattgctttcctt

SEQ ID NO: 4108 - DNA, 340 bp, Cyanidium caldarium
  Clone ID: LIB190-020-Q1-E1-D8
cccacgcgtccgcccacgcgtccgaagccatatctatttttagtattgtgggatttgtctggttaggagccatctgcatggcgattatcggagcgtgggcctaagaataaaatttgtttgagacgtcgtggtgcagatgactcgcatgtttggtagttggttcaagtttgacaagagaaaacatttgttgctacttcttacaaataaaaaaagttcaaggacaaattgtagataaatgttgaactgtcaaagaaacatttgtaatacagtaatggggagagtcacaggcagtgagcggagatagtctcatgttagcagatggtggggcgcaagctgtcaa

SEQ ID NO: 4109 - DNA, 434 bp, Cyanidium caldarium
  Clone ID: LIB190-020-Q1-E1-F10
tacaatggaccaagtgttgtatggctcctacttatacgggtttaagaaaagtaagacagttggctaaaatacaaaaaataagagagcaagtatggaaagatagacaaggaatagtagagaaagatccttatgcggtttctactctattagaacgacatcctgagttgacgttggaagaaaaacaacaattgcaatccattgaacaaggaatagcacctgctactggacagtcttatgattatctttttgccgatatatttggtagagcgttggaacctcctccacctggagtacgttctcttcgaaagcctttaaggaagaaacccaaggaacctcattttgaacatcacttacaacctcgtatatgggataatccatttagtgaatttcgagagtcggaagcacaagaacgttggaaagcaaagttgacaaga

SEQ ID NO: 4110 - DNA, 210 bp, Cyanidium caldarium
  Clone ID: LIB190-020-Q1-E1-G1
cggacgcgtgggcggacgcgtgggttccaccaggggagtaaaggcgcaagaaagaaacccaaagcaattgacgggaatcggaaaaaggggtggatcacgtaaattaatccgataaaccgagaaccttacctctccaagaaggtgttgcacggctgtcgaaagaacgtgctgtgaagtgagagaacgtacgagaaagccaagtgaggaaaa

SEQ ID NO: 4111 - DNA, 286 bp, Cyanidium caldarium
  unsure at all n locations
  Clone ID: LIB190-020-Q1-E1-G6
cccacgcgtccggtacattcaacatcatcaaatgccaaagggaggaaagaaagattcttcaaagaaagaagccacaagtaaacctgcagcagcagatgctacaaagacgacagaaaagtctggtccggaagccaagttgaagggaactggtgcaaagaaacaataaaaagttgactatgcatgtgcagtcctgttatgttttgtgagttctgtttgatagtttccagctattcttttggtagtgaataaagagaaaattttttatatttaaaagaganatagaaga

SEQ ID NO: 4112 - DNA, 330 bp, Cyanidium caldarium
  Clone ID: LIB190-020-Q1-E1-G8
gtgggaagtaaaggcattcctgcatggcacaaacaacatcgcaaaagttccctattaacccgaaaccgttcctccacgacctgattggaaagccacttattgtaaaacttaaatggggtctagaatatagaggtttattagtgtccctagattcttatatgaacttgcaacttacacaggcagaagagtggataaatggaaaaatggctggaaagctaggggatgttcttataaggtgcaacaacgttttgtatgttagaggaggcgaaggtgaagccaacggagtacaaaagtgacacaaataaacttcagcacgttcctaggtaaaaa

SEQ ID NO: 4113 - DNA, 405 bp, Cyanidium caldarium
  unsure at all n locations
  Clone ID: LIB190-020-Q1-E1-H12
aaaccggagctattgacaactccaacaacttcattgagagcgcgtatggatggcttattatttatgcgaaatcaaaagccgacagttggtttgcaagagacaagactcaatatcgtangagcagtgtatattcatccctcggcaaaagttgaaagcaatgccaagattggaccaaatgttaccattgctgcaggtgtagagatagctgctggtgcaagattgaaggattgtattattttagaggatgtgaacatcatagaacatgcctttattagtcatagtattattggttggggttccattgtggatgcttggactcgagtacaaggaacagcggagaatccaaccatatttggagcaagagtagttacagaagcagagattgttgttcgcaattgtacagta

SEQ ID NO: 4114 - DNA, 468 bp, Cyanidium caldarium
  Clone ID: LIB190-021-Q1-E1-A11
gggacgacccacgcgtccacataaaatgcccaatattggtgagtcaaaatccttctcctcctcctttggaaaatttgaaaagttcggggggaaaatggctggattgttcaattcaggattttgaaatgtaagatataattggtttatatttacgaatggaaacgatggaaaccgcctacggctcgttttttgattggcgatgaagtaacacaagtctatgctgtcggagctattcatcacgttccagaaatgaagtcttttggagatgtagacacgagtgttgtattgttacacttccgaaatggagtaattggcactattgacaattctcgcaaggcagtttatggctatgaccaacgatgtgaagtatttggttctcaaggctctgtgcacatcaacaacaattatcccaattccgcagttatttccactagtcaaagtattatgcgtgatttaactcttcacttt

SEQ ID NO: 4115 - DNA, 427 bp, Cyanidium caldarium
  Clone ID: LIB190-021-Q1-E1-A4
ccgggtcaacccacccttcggcccacgcttccgcggacccttggggtttgtgtcaaaggtcccgtcgttttccttgggtattataacgacgaccaagcaacaaagaacatttgatgaacatggttatttctgtactggagatgtctgcgcatgggactatgacggcacactttccatcatagaccgaatacaagaatttattcaagttagctcaaggagaatatatttcaccgggatacctgcaacaacagtaagcctcctgtaagtttgttgaacagatgtggatttatggcaatagcgaggaaagcgaacttgtcgctgtactgcatccgaatcaacaccaagcacacgaatgggcataagagaatcagaaggaacgacatttgaaagctctatgcaaggacagagacttcaagaaagctgtttt

SEQ ID NO: 4116 - DNA, 220 bp, Cyanidium caldarium
  unsure at all n locations
  Clone ID: LIB190-021-Q1-E1-B3
attcccgggccgacnctcggaggaaattattgggaaaattggcattcaggggaattaagggccccacaaacccattttaaagcggggtcccaagcgcacgcgcagttaatttcacaccatttttataaccccacgctgaacatgatgaaagggcggtcccaatccttttgacctgcagtaaaaatttggcaaaaagagtttccaagttacttgtgcaaaa

SEQ ID NO: 4117 - DNA, 404 bp, Cyanidium caldarium
  Clone ID: LIB190-021-Q1-E1-C10
cgacccaggcgtccgaaacgaataatgttttgggacattaaattttcgctcgtgaattgacgactggcgatgaaaacgacttggagaccgacatgggcacttatccatcgactttatgtaaaaaccacaagtagaattgttcatcaaccaaaactgggttttcaaacaagcccttttcaaacgtccctttttgtcctttcgtctgctgaacaagaacaaggcgggtcctcgaaaagtcgccagtctcatgcttttgcctcctttgctaccgtagcagccactgtatttggtaccatttatatgacgtgtcccattttgaaagcagacgatgagactctagagcctccaaaatacccttggaaccattctggtcctttgtcttccttcgatgccgctgccattcg

SEQ ID NO: 4118 - DNA, 414 bp, Cyanidium caldarium
  Clone ID: LIB190-021-Q1-E1-C9
tcgacccagtcctccggaaacaactattcttaccattgaaataccgcattaggttcgttttggcagattacacaggttttcggtaaagaaagatgaagctttgcccgacagtggttcttacttacccagcgcggtttgcaccagactcaccttatgacttgacgacatggagatacgaatacctttagaagtggatacacacaccacatcttgcaatagacgtatttattgcaaacgttgtcccaataactaagtgttgaagctctaggaatcggctttcgtgcgcttttgatatcgactgcatgtactggaacccttggttgtgccatatttctttatttacctccagaatatagatcactgaaccttcgttagcgtacgcagcacttttctgaagatttaaggaactggtta

SEQ ID NO: 4119 - DNA, 452 bp, Cyanidium caldarium
  Clone ID: LIB190-021-Q1-E1-D11
gtcgacccaggcttcggcagcgcgttgttctccttggaatcttcaaactgttcatttgccagatgatgttccattttgttctccattgtcgtgtcctacctccaatggtattcgttttcgtggtaaactaggaaaaggtggacgcattatttttgataaagttgtggatagcagtcatggaattgggacacctgtcgacgagggaaaggaaagatggctcttatcttcgtctaattctaatttattgccagatgattcagtggctgttccttgtgaaaagtcaaggccttccatctcgacgccacaatcgaattctgtggaaagcatgtcattgaagtggccttcaaagaagaatggcaaatgtttagagaacggtagacattcctgtgaagaaagagagtggagtggatattttatcgttgcttcggaatctggggagaaagactggaaaa

SEQ ID NO: 4120 - DNA, 466 bp, Cyanidium caldarium
  Clone ID: LIB190-021-Q1-E1-D9
tcgacccaggcgtccgggtggataaatgatgtaaggaatataagcatgttagtatgctggatatggttggaagtaataggaggagtaaagaaggagtacagaggaataataagcagtataggaataataaatataccgataataaagtactcagtagagtggtggaataccttgcatcagccagtgagtataagctcatggggaggaagtataggaagagaagaagtagaagaaatagtgaaggtaataataataggagtaatggtgagtatagagaagaacatgaggaagaaagaggcaaatacgggaaagcagtaaaagaagaaagagaaaggaaaaaactgagtatcaggaagaaaagagggagtagatgaggaaagaaagatcaaggaagtaagagtaagagaaggagtaatgtgaatgaaagcacgaaagtatttgaagaagagagtgtaaagcgcgtaac

SEQ ID NO: 4121 - DNA, 198 bp, Cyanidium caldarium
  Clone ID: LIB190-021-Q1-E1-E10
gtcgaccaggcgtccgcccacgcgtacgcccacgcgtccgggaaaaaatggaacaagcactgcaagcgttgagaaaagaactcgagactcgagaagctttagatgctccgaacaaagactgacaacacagagtgaaaagtatttgcaaatttggaacaaaataaatatcttcttgtttccaccagaaaaaaaaaacaa

SEQ ID NO: 4122 - DNA, 440 bp, Cyanidium caldarium
  Clone ID: LIB190-021-Q1-E1-F1
aggtaccggtctagaattcccgggtcaaccaagccttcggcggacccttgggaaggatgtcgtcttcctcgcaaaaccagcacaacaaaaagaacaacccaccaacagaaataaacaaaggtttaagaaaaagacccgcacatacggaagaaactcgcaacacagacaatgactcttcggtagaaaagcgaaccaatgcttccctatttgaatgtcatatttgtttcgactctcccaatgaccctgtagtgacaccttgtggacacttgtattgttggtcttgtatttacaagtggatggttgctcatcctgaatgtccttcctgtcctttatgcaagtcaagtattgagaaagacaagataattcctatttatggtagaaatgaggaggaaaaagtggacccaagaacaaagcctgttttggataacaatattcctgcg

SEQ ID NO: 4123 - DNA, 241 bp, Cyanidium caldarium
  unsure at all n locations
  Clone ID: LIB190-021-Q1-E1-F11
tcgaccacgcgtccgaaaaaaggcagtgtcagtcttccgctgattattcagttccatttgtcanaatcggtataaggtcaaagtctcgataagaccgtgtcagattgtctctcgtcattttcatcttggatgaggttatgaaaatttgtcgtgtcagtatattgtcattcaattctgaaacgcgtaccttttgcataatgtcccagggagtgcgctctgaaggatccagacttacgtagac

SEQ ID NO: 4124 - DNA, 448 bp, Cyanidium caldarium
  Clone ID: LIB190-021-Q1-E1-G12
tgggaacgaaggaggtgtatgtaccgctaaaatgttaccgaccggaggtacaaaacgggaaggcacttgttaatttatttcaaacaataaccaaccgagagctttttcgtttggtaaattttcgttccaacataataatattttactttatcacagccactttagaactaggaaaccacagattggaccttccgaggtgtgccttcacgcgcaactctttgtgaagcgaaagtcagcaaattgtcatatttgtgtactgagggcaaaaataagtacaagtaaaagtataaaatgcccaaacagtaatgaaaaggaaagtttggcgagtttggaggaagcttttgaaaacgctcttcgagtggtatgggataggaaaccaaaaggctattggtccagtattgaaaatctcactaacgaactcgggagattgatcgaaaagtatgattcc

SEQ ID NO: 4125 - DNA, 432 bp, Cyanidium caldarium
  Clone ID: LIB190-021-Q1-E1-G3
cccgggccgacccacgcgtcggcccacgcgtccgcccacgcttccggcaagaaagaaacccaaagcaattgacgggaatcggaaaaaggggtggatcacgtaaattaatccgatataaaccgagaaccttacctctccaagaaggtgttgcacggctgtcgaaagaacgtgctgtgaagtgagagaacgtacgagaaagccaagtgaggaaaagaaggcaagtagagggcggcccgagaaaggagagggcgtaagacgtgatacagagtaggaagaaaagagaagagagctagaaaggaggtaaaagaagagtaaaaggactagaagaggtacggaattcacgaggaaggagcgtgaaggaaggaggaatcccaagtaatcgaggaagaaaaagcttcggtgaaagcgtgaacggattttgtacacactgcc

SEQ ID NO: 4126 - DNA, 143 bp, Cyanidium caldarium
  Clone ID: LIB190-021-Q1-E1-G8
gttgtttcacaaaaaaaaaaaaaaaaaaaaaaaaaaaaaaaaaaaaaaaaaagggcggaacaacaataagataaaaagcaatacataaacgtgaatgcaaaaatactatcacatcaagactgtcacttcaaattcaattcacg

SEQ ID NO: 4127 - DNA, 312 bp, Cyanidium caldarium
  Clone ID: LIB190-021-Q1-E1-H1
cccacgcgtccgaagacagtgaaaaggatgccaaaacttcctacttggaaaattatttggaacgacgcacgaagaccagagtctactccattctatcttggttacttgatcgttttgaccttttcgtggtttgcgtttaaaccgaccgatgaaaactataaaaactctcccaatccgaggtttggaagaaatgctgtgaaggagtcccacgattccaaacactagaaatactttggttgttggataaagtgttatttttgttgtaaaaaaaaaaaaaaaaataaaaaataaaaaaaaaaccaaaaaaaacaa

SEQ ID NO: 4128 - DNA, 444 bp, Cyanidium caldarium
  Clone ID: LIB190-021-Q1-E1-H3
cggtccaggaattcccgggccgacccacgcgtcggcccacgcgtccgcacgaaaatttgcaaaattctggcgcagaatcgataattacggcctcattgccgaattgtcgatacatcggatacaacttgttcccccgttttgtgacaagatgtcacgttggtgaaccaacagacaactctgcttgctactgagttttcttgtcggtttgaaccacgtttcttgttcagaagaattgaatcagtatgtgttatgtcacaacgctcaaagagaaaacaaagcgaatctaggagtactgactcgtctgaggaacaagaggctagtattgaagaatcttttacaccacaattaccttctcttagaacactattacaaggtacgacagatattccaagaaacaaacaaagcctctcaaagagtgaaagtgaaaaaaaatcgagtgtttaa

SEQ ID NO: 4129 - DNA, 424 bp, Cyanidium caldarium
  Clone ID: LIB190-022-Q1-E1-A11
gtaacagtgacatggagtcatgagagtatgaggagtggagagaaggaggagatggagaagggtttgatgataacgataatgttggggataatatttttgatgatacaaggatatgaatattatgaatcagagtttaggataacggatggagtatatgggagtagtttttatatgggaacgggatttcatgggatgcacgtgttagtgggagtaataatgttatcgatgggattgataaggagtataagaggagagttaacggcagagcaccatgtaggattggaagcagggatatggtattggcactttgtggatgtggtatggttattcttgtttgtgagtatatactggtggggaggtgtataggaagtatagggaatggaaggaggaagggataagaaggatgaaggagatagggagggca

SEQ ID NO: 4130 - DNA, 372 bp, Cyanidium caldarium
  unsure at all n locations
  Clone ID: LIB190-022-Q1-E1-A7
tcttcaaatgagtctatcgagacgttattgctaaagacgtttcctaaagaaatccctacttcgtattgtctcgtgtatgcacttttggctattccagtactcgcgctcgacgtgtatttatatcttgccgtactccacttgaactttattgcttcaagcgtttcgttgatcatcggtactacagtcggcttggtgcttctagttacgtcgtatcataaaactgcatatgccaagtggtctaagctcgatcgcacaacagagcaaccaaccaagagctctttcaagggtaatttgtcggcatnacgaagtggagttgagagtcacctatggctcctggaaagatcctcggtcagttacagtgtantgataaac

SEQ ID NO: 4131 - DNA, 430 bp, Cyanidium caldarium
  Clone ID: LIB190-022-Q1-E1-B10
gaatggcggtcctaacggtaaggatccaaaggtagcgaagtaaatagacgtttgaaaggcgtccagtatgaaaggagaaacgagtgtagcactgtctagtcgtccaactcagcgaaacagcaataactgtgaaaatgcagtaaactagcagtaggacggaaagaccccataattcttgactagataggtttagggaggagagagaatcatgaagtagaggaggtggggtaagagatgaaagaccactgcatgaggataaggaatctaactgagtaaggaaaataagcttaagctagtttggctggggaagtaaagcctaagaaagagtaaattaggcaagcaaaggcatgagagaagtataatagcagaagcatgcttgaagaaaaagaaagagatttcagaaagggaagaaaagtcagctatagagaac

SEQ ID NO: 4132 - DNA, 379 bp, Cyanidium caldarium
  Clone ID: LIB190-022-Q1-E1-B12
cccacgcgtccggttttcgatgagcttagaggaagtattcaacaaggcagcggaagaagtaaaaaaactgtcttcggcatccaacgaagacaaactggagctatatggttactttaaacaagccaaggagggtgattgctccaccgagaaaccaaaaggtctttttaatcaaaaagaaaaagcaaagtgggacgcctggaattccaaaaaaggtatttccaaagaagaagcacagaaaaagtatatcgaaaaggtcgatcaactatgcggcacgcagtttcttcaaagcgtttcctagtcaccttaggtccttgctctttttttggtttgtcggtcctaattcccaaaaaatatgagtaaagtaccgtttttttccgcc

SEQ ID NO: 4133 - DNA, 235 bp, Cyanidium caldarium
  Clone ID: LIB190-022-Q1-E1-B5
ctcacgcgtcagcccaggcgtctgcccacgcgtccgcggacacctggggcaaaacatccaagctacgacaggattcggtggtggattcaggttttccgatacaccttcctccaccaatcaaggtaacactggtgacgaggatctctattcgtacgacaacggttcacgaatctgtgcagtttattgatgtgtggcgttttgttgaaataaacatttgtttagtttacaaaattgg

SEQ ID NO: 4134 - DNA, 368 bp, Cyanidium caldarium
  Clone ID: LIB190-022-Q1-E1-C8
atgttattaggaagagaaaggagtaaggaagtaaaggagatgataaatgtgagtgtaagtgagagtggagtatggagtggagagaagaggaagaggagtgtaatgaaggaggagataaagggagagaaggagataagggagtggagtgagataaggatggaggaggagatggtaatgataatagcatgtatggtagtccattggagcaatttgaagtggtatcgctgtataagatggagatagaaggaagggaaatagggataagtaacataggagtgtatataataatgataagtgtaaaagggaaaggaaaggagagaaagaggaaagggatgaaatgcagagatctctagagaaaggcaaaacac

SEQ ID NO: 4135 - DNA, 108 bp, Cyanidium caldarium
  Clone ID: LIB190-022-Q1-E1-F6
attcagatatgatagacgggaaatccgaagtagacgatatttgggttacctggaggacttaatcaaggttgatctaggggtccacttccagaccttagagtgctggtt

SEQ ID NO: 4136 - DNA, 298 bp, Cyanidium caldarium
  unsure at all n locations
  Clone ID: LIB190-022-Q1-E1-G6
cccacgcgtccggagagggtaggcttagaagcagcaaaccagagaggaaagcgttaaagcatgaaagaaaagaaatccgaaaaagaagagaaaaaggtaagaaagaggaccgaatcagggtaagaggtagaggagcaagaagagaagagagaatgctgggtggagtagcgaaacaagagaagggaagtaaaaggtaagaaagaggaaaggtttacgagagaaggaagtagaaagaagagagtgtaaggcggcgtcataatagaaatccgaaaggagtagaagaaaagagagagaaatn

SEQ ID NO: 4137 - DNA, 282 bp, Cyanidium caldarium
  Clone ID: LIB190-022-Q1-E1-H1
attccgaggtcgacccaggcgtccgaccacgcgtacgaacagagtggctacagagtaaggaacagatagggaatgtaatggtaataagtaaggtaatgtatggagaaaagatgatacgaataatggaatgtggaatgatgttaatgttaccaatgatagcagtaataatgatggtggaaggacaagagagaaagaacgaggatgtaagggagcaggagttaagaagatgggaggaagtgataagaagaaaggaatgaggattcacgtacagcacgacaacca

SEQ ID NO: 4138 - DNA, 429 bp, Cyanidium caldarium
  Clone ID: LIB190-022-Q1-E1-H11
ccgacgcgtccgaggacgcatgggcggacgcgtgggcaagaggagaggacattgaattgttcaggtcataacaaaggaaatggtgatggaataacttctgtttcatttagtcctcgttctccttagcgtattgcaactggttcgttggaaaagacagtgagagtattcgatgtagagaccggtgaacttttgcacaattttcgtcaacatgcagattctgtatattctgttgccttttcgagcgatggaagatatctgttatcaggttcacttgataagaatgttatattatgggatcttgcagctccttctccaaatgactagtcaattttcaaaggccatactgactttgttttgtctgtcgcatttagcttaaacggtcgtcttcccttgagtggcaccaaagaccgttacggtaactttctggga

SEQ ID NO: 4139 - DNA, 284 bp, Cyanidium caldarium
  Clone ID: LIB190-022-Q1-E1-H6
acggtcaagaattcccgggtcgacaaacgcgtccaagcaaagcgaggtgcaaatttacattcatcaccgcatacatcagtaaacgatagaagcatttcatcacaatcggatgcatggtactgactgaatacagatgttctcgtaagaatcgtggaatcattcaaagagactcgaaacgaaatcaagggcatttcagagtatacgaaccagcggaaatagaaaaaattaaggatctagaatgtattaggaaatgctatcgactaaatgcgtggcagtgcacatgg

SEQ ID NO: 4140 - DNA, 202 bp, Cyanidium caldarium
  Clone ID: LIB190-023-Q1-E1-A1
aattcaaaaagctgtgttttgcgctttaaatggaaaaaaaaaaaaaaaaaaaaaaaaaaaagaaaaaaaaaaaaaaaaaaaaaaaaaaaaaaaaaaaaaaaaaaaaaaaaaaaaagaaaaaaaaaaaaaaaaaaaaaggggggaagcgtcaaaaaaagagaagtgaggaatgaggaaaagtaagggaaagggagccaaaaag

SEQ ID NO: 4141 - DNA, 327 bp, Cyanidium caldarium
  Clone ID: LIB190-023-Q1-E1-A12
gtccagaattcacgggtcgacgcacgcgtccgcggacgcgtgggtatggattgtatttgttctctcaagacgtcgagatgtatcgttggcatttctgcaatgcaaggcatttctagtatttgaacttgtggagatgtttcgaatggtgaatgagagtcaaatgttagtgtccaaccccattgacgcaatatttccttgtatcggttttcatattgtactcgctcatcagctgcatgttgatccatagcatatagcgttttatctgcccaaaacagtaaaaaacttctgttccagactcctttccattgcattttgtcgaaaatatct

SEQ ID NO: 4142 - DNA, 390 bp, Cyanidium caldarium
  Clone ID: LIB190-023-Q1-E1-A2
tacctctccaacaaggtgttgcacggctgtcgaaagaacgtgctgtgaagtgagagaacgtacgagaaagccaagtgaggaaaagaaggcaagtagagggcggcccgagaaaggagagggcgtaagacgtgatacagagtaggaagaaaagagaagagagctagaaaggaggtaaaagaagagtaattggaactgagaaaaggtccaaacaagagaaatcagcagtggggaaaattgggcaatgtacagggaagtatgacccagtaatgaggagtggagtaaacagaaaaggaagtaaaaggagggaatgaagggaagttatggcaaaaacacgtgccagcagcagcggtaaaacgtgtgtaacaagcgtagagcagaagaactgggtgt

SEQ ID NO: 4143 - DNA, 362 bp, Cyanidium caldarium
  Clone ID: LIB190-023-Q1-E1-A5
gaaataaagcacgaaacaggttttatttcgtcgcactgaagaactcacaaactcagtgtagagaatccaatttgtttccatcacacgaaaatttcagactctccaaactctgcattgggatcgaagccaccaaaggcaggctgctcattaaaagaaggccatgatggataggatggatattgaggaaattccacataggatgtgtaagaaggagcgtaaaaatagctaggcgaaggatatccctttgagtaatctgcaaagtctacttgagctgcttttccattgtcctttgatgaggcactactagttacttctaacttggggatcttggttgtacctggaataacagaggcgttgcctga

SEQ ID NO: 4144 - DNA, 419 bp, Cyanidium caldarium
  unsure at all n locations
  Clone ID: LIB190-023-Q1-E1-B12
gaccacgcgtccgaccacccttcggccaacccgtccggattaattccaaattaatttaacaaaggaaacaacaaggtcaaaagccaaaactttgccaaatttccaaacaaacttatacccaacctcaatcttaaatccaacccccaacctagggcaaagctccttcctacaatcaatattcttcttcgtacggttcctctagctatcgtctcttaactgcagacgaaaaccaacttgtgagcagaggaggttatgcaccaacaagccaatgtattctagttcctatccaatgctgcactgattgcaaacaatgctatgccgcatggagttcctaaatactgatacagtgctcggctagaaagaaacagatatcaacggatgtttttttcctttacgtgaataanacttgtgttcataac

SEQ ID NO: 4145 - DNA, 440 bp, Cyanidium caldarium
  Clone ID: LIB190-023-Q1-E1-B6
gcaacaccgactgtttagcaaaaacacagcactctgcagaaaagagaaaatgtaaagtatagagtgtgcggcctgccaaatagtagagaagaaatcgatgaaagtgaaagcgagtaaaagatgaggtatagagaatggcggtcctaactgtaaggatccaaaggtagcgaagtaaatagacgtttgaaaggcgtccagtatgaaaggagaaacgagtgtagcactgtctagtcgtcgaactcagcgaaacagcaataactgtgaaaatgcagtaaactagcagtaggacggaaagaccccataattcttgactagatacgtttagggaggagagagaatcatgaagtagaggacgtggggtaagagatgaaagaccactgcatgaggataaggaatctaactgagtaaggaaaataagcttaagctagtttggctgggga

SEQ ID NO: 4146 - DNA, 396 bp, Cyanidium caldarium
  Clone ID: LIB190-023-Q1-E1-C10
gtccagaatcacgggtcgacgcacgcgtccgcccacgcgtccgcccacgcgtccgcccacgcgtccgcccacgcgtccggaaaaggagttgtctagtgcaaaggaagaaggtttgagtaccgacataaagaaagttggtcaaaagtggggacgaaatgcaaaaggtgaacgttggtatgaaacttggaaagtaaagaataatggaaaggttgaaactacgtatcgtttagaaagagccaattctggcagttgttgaacataggaacttggcagctgtgttgtagtaattttgaaaatagctatttctgtttgttgtagaatttcaaatatatgaataaacgcaaataactaccttttcaaatacaaaaaacatccaaatcccggcaccaaccctac

SEQ ID NO: 4147 - DNA, 393 bp, Cyanidium caldarium
  Clone ID: LIB190-023-Q1-E1-C3
cttgttgcattgagggaattggagaatgtagtcattcaaattccacttgctaagagtgcaggtactccaaagttacgaggtgctgatggagagttttcttttcgttcaggaatggtggaatggaaaatagctcttgtggataaggataatcctcaagggtccttggagtttgtaacagaacctactcctgctactagtttcttccctgtacaagtgtcctttacgagtagtgaaatatatggaaagattggaatagaatccgtgaaagattcgtccgacgaatctcctcacaagttttctttggagaaatgtttgactaccgaacgatattccattgtacatgactgacagtacagtaaaaagttgatatgatgtataacaagcgtaaaacag

SEQ ID NO: 4148 - DNA, 393 bp, Cyanidium caldarium
  Clone ID: LIB190-023-Q1-E1-C4
atacccgggtcaacccacgcgtccgtgacgttcccatcggtttgcttatacaggatgatccttcttacagatataatgctctcatattcgtcaatggttggatgctggggcactacatcaattacttaggaccacaacatgactttgtacttcataatggaattctgaatcccaatggaaagaatgatatagccatagcagtttggggacaagacattgctggaggaagacttggaaacgtgtccctgcatgcgtatcaagttttaaggacggaacccagaataactgaaattaatgacagtccaaactactggcaaattcttcctcgtctagaggagctatgttgagtgtttcccgtatcgatgtttgatgttgatttgttcgttcatataa

SEQ ID NO: 4149 - DNA, 445 bp, Cyanidium caldarium
  Clone ID: LIB190-023-Q1-E1-D10
ccggtctagaattaccgggtcgacgcacgcgtccgtactgatatactttagacatgtaaatactatcggtcctcttaagacttggctactctttggagacgcaagtattcatatccaaaacctggaggttcatttcgtactctttcatgtcctgtcgttgtagttgttactggcaaccgatcttcaagatgcgaactttccagagactcttgtgagctgtggacggaagaacgaaacgtgcgttttggtaatatcgttgggtccttttccacacggtctgtgggtttcttggatgactctacaatacttttcgatgttctgctattagagtgatgatccacgctggtggtttgtggatgtcgacgatccattggctcaggaaaactttttcgcatcttctttgataggatcttcgtacgcattctctcgtggttgtttcccaacg

SEQ ID NO: 4150 - DNA, 321 bp, Cyanidium caldarium
  Clone ID: LIB190-023-Q1-E1-D9
ggccaaacgtccggagcgtccctccgctggctggctgcaggcaaatattcgattcaaagtatggaagctggagaaggagatattactgttagtcaactagtaaaggaactgttgaagcgagaatggagcaacgagcaatacagacagatgaacaaaaggtttttgcgcaatcttggcatttttgcaacagcaatttttgtttttagaaagtatggagaattatttgctatttgaaagataaatattatcgtgagaaagaaataaacgctgctcctaagtgcctattggactgaaaaaaaacaaaaaaaaatggaaaaaata

SEQ ID NO: 4151 - DNA, 447 bp, Cyanidium caldarium
  Clone ID: LIB190-023-Q1-E1-G10
tcagaattcacgggtcgacgcacgcgtccgaagaaacctttatatgtctgtttagcacagagaaaagaaattcgacaagctcagttggaagcacaacgtatagctgctgctgctggaggtttaagaattcctggagcagttcctggttccttgtatccccaaccaggagctccaatgttttatcctcaaccaggcgtaccacctcaaatgcaacttcaatcaaatatgatgggaagaggacaagcttcgtttattaacccgcaatatttggcaatgatgggtcaaggaggaggaggaggagcagccgcagcagcagcagcagctgctggtcctgccgctacaggaggagcggcaatgggttcgatgaatcaaaactttataggaagaggaactgcagtcatgtccagtcctggcggtggtggaagaacttcgtatcctgcagcttct

SEQ ID NO: 4152 - DNA, 424 bp, Cyanidium caldarium
  Clone ID: LIB190-023-Q1-E1-G8
cgacccacacgtccgcccacgcgtccgcccacgcgtccgcggacgcgtgggcggacgcgtgggcacttgttgaggtagttacacagcatgtgggatggttgtttcaacctgtcttgaacccttgacagtaaaaagacgaattggaagcaagctataacctttaccagacagtggagtcaactcagtgaatgcaagcacaataatatgcgacgattactctgttttacttgccttggtcagtcgacattatccgacaactacggttattttgagcaaggtatgatgcaaagcctcgtggaaatttgtttaaaaatcaaatccgtgtagaacacaattattttcaacaagtgccgaccaagtggaaggaattggtaaaagatgttcatcgttggtttgttaatgcttgtatacctggaaagaaacc

SEQ ID NO: 4153 - DNA, 404 bp, Cyanidium caldarium
  Clone ID: LIB190-023-Q1-E1-H12
tcacgcgtcgaaacactgcactggcattattcgactcgctcagcagttacctgtggttgatgtagaagcggtcaatttgttagaagaaaaacagtgtcaatcttctgccgattattctgttccagttttcagaagtcgggatcatgtccgagtctccctaagaccgtttcaaattgtctctcttcaatttcagcttggttgaagttatcaaaatttgttgtttcagtaaattgtctttcatttcggaaaaaaaaaaaaaaaaaaaaaaaaaaaaaaaaaaaaaaaaaaaaaaaaaaaaaaaaaaaaaaaataaaaaaaaaaaaagaaaaaaaaaacaaaaagataaaaacttaaaataaaaaatacaaacaaaaacataaaaaaaaaaggggggggccccccaa

SEQ ID NO: 4154 - DNA, 386 bp, Cyanidium caldarium
  Clone ID: LIB190-023-Q1-E1-H4
gggtcgacgtacgggatttacgtcggggcatttcaaaagctcaacctaaacaaccaacatctgaccaagacaacgcttcaaaagccaaaaaagccgaaaaacctgcaggaatgattccttctgcacaaaaagattccaaggccgttgaatggagcaatagtgaaacaacgtcaaaagagcgtgaaattgaaaaacctttaaactgtccttgtattcacaaaattaaaggaaggttcctgtggtgagcagtttatcgcagcatatcgctgttttcttgaaagtgaaacagagcccaaaagttccgaatgtgttgaataattttcatcgatgcaaaagttttatgtaaaacaccgggagagtatgacttggatagtgattccgatgac

SEQ ID NO: 4155 - DNA, 134 bp, Cyanidium caldarium
  Clone ID: LIB190-023-Q1-E1-H5
gggaaaaagcccagaagccaagataaggtatcaaagtaaagaaagaaggaaaaggagaagaagagagggtaggcttagaagcagcaaaccagagaggaaagcgttaaagcatgaaagaaaagaaatccgaaaaa

SEQ ID NO: 4156 - DNA, 410 bp, Cyanidium caldarium
  Clone ID: LIB190-023-Q1-E1-H6
cccgggtcgacccacgacgtccgggataagaatagttcctatcataaagctggagaagaagaagaagaagaagaaggaagaaagagaacggaccagcagcaacaatccaattcggattgggacctcatttacggaattgaacaagtggacttgcgaccaccggcagcagactgacaagaagtaaaacagcaacccaagttggagttttaacaaggatggaaaaggacaacgataacagctggaacgtcgaggataaagactcggtggagttgttcttagatgcagctcgttttggtgacctttccctagttgttgatttgtattctcagtattccaataaacgtgtgttggaaggcaaaaacaacgatagcccaatcacaacaaattacgcaacctgaatggcaaatggg

SEQ ID NO: 4157 - DNA, 361 bp, Cyanidium caldarium
  Clone ID: LIB190-023-Q1-E1-H8
acgagtccgatttcttttgggtgtgaagagttgcgcaaaagagagaaagagagagaaatggcaacgacgagtggaagaggaggaggaagtggcggtggtcttaccggacctccaaaaccaccacctcacgcagcaatacaagatggacctcctcctggtggttatccaccggtggatgttcgtagaaacttgcccaaagttgggccttccggtactactttgttgataggcatcggactgatcaccatctatgggttttggggagcgaccaaatcagctcaacgtagaagaagactgaaccaggaaaagtatcaaattcgattggctattacgccgtatttacaagccgaacaagaccgtt

SEQ ID NO: 4158 - DNA, 421 bp, Cyanidium caldarium
  Clone ID: LIB190-023-Q1-E1-H9
gcgtccgtttgtacacgtcgttgtggcccttctcccaagtggccctttttggtgcacaatctgttatgcacccaaagaaactagagcttttacaaaagagtctagagtacgtaccaagttgtggatttacagtggatgccgtgagaaaggcagtagaaagtcttggtttatcaaaggcagcaactggtttattggaacgaggactcgtggagttggttgaatttcatcattcggttgcagataaagaggctgcagattatgcacatcaaatagcggacaacgacttggaaaggaaagacgtgatcattgcagcgctacaaagaagatttcagtgtagcgaggattttcagtcccactggtcgcaagctatggcgttggaacacttgccacaaaactggccggccgctacaaggcgtttgtt

SEQ ID NO: 4159 - DNA, 418 bp, Cyanidium caldarium
  Clone ID: LIB190-024-Q1-E1-A3
gggtccaggggtcgagggtcgactcacgcgtccgcccacgcgtccgcggacgcgtgggtgcaagttggttggtttctggactttaaggcatctctgttctcttgttggtgtgactgttggtagatattgtgaaagatgggagtcaaagttggtattaatgggtttgggagaattggaaggctagttcttagagctgctttggagaaacagtctgtagatgtggtagctatcaacgatccctttattgatttggactatatggtctacatgttcaaatatgactctgtgcacggcgcttatccaggtacagtggtagcaaagaatggaaaacttgtcgtggatggacacgaaatggcagtgtttgccttccgtgaccctagtgagattccttggtcctctactggagcagaatatattg

SEQ ID NO: 4160 - DNA, 445 bp, Cyanidium caldarium
  Clone ID: LIB190-024-Q1-E1-A6
ggtcagaattaccgggtcgagccacgcgtccgcgtaaaccggacgattgggatgatgaagaagacggagagtgggaacctccaatgataccaaatcccaagtgtgaagaagtgggttgtggagaatggaaaccacctatgattcctaaccctcgttacagagggaagtggaaggcacctctcatcgataatcccaactacaagggtccatggaagccaagaaagattcccaatccagactactatgaagatctacacccatctattcagccaatcggtgctattgccattgaaatttggactatgaatcaaggatttgtctttgataactttttggttgattttgacccagaaaacgctgccaagtttgcaaaggaaactttcgaggtaaaacacaagcatgaagtatctgcagaagaaaaggagttgaagcgactttccacaaa

SEQ ID NO: 4161 - DNA, 382 bp, Cyanidium caldarium
  Clone ID: LIB190-024-Q1-E1-B2
cacttatgacgatatcaaggcaacgatgaaagctgcgtcagaaagcaaagctttaaagggaatattggcatataccgaagatatggtagtttctactgactttgttcacaatagtcattcttcgatatttgatgcgaatgctggaattatgttgtcggaaacttttgtgaagctgattgcttggtatgataatgagtggggctactccaatcgtgttgtagatttggtgcaccatatggcgaaagttgatggtgtagcttaactctgcttttcttgttgttttttcgtgtattgtttgttttgtgaaagagatgaaatgtgttgtcttttccataaaaagttgtgtgcgctgtgaaaaaaaattgaaaaaaaaaaaaaggaa

SEQ ID NO: 4162 - DNA, 475 bp, Cyanidium caldarium
  Clone ID: LIB190-024-Q1-E1-B5
caggtgccggtcaggaattcacgggtcgacgcacgcgtccgcccacgcgtccgcccacgcgtccggttactggaaatctgtttggagatatattatctgatgaagcttctatgttggttggttctttaggaatgttaccatctgcttctttaggagaaggcaatcgtccaggagtatttgaacctgttcatggttcagctcctgatattgctggtcaggacaaagccaatccactagcttgtatcttatctgctgccatgatgctgaagtatcagtttcagttggatgaagcatctcatgctgtggaacaagctgtttaccgagttttagacgaaggatatcgcactttggatattatgtctccaggaaagactttggttggttgtaagcaaatgggagaacacgtattgaaacacttgcaaagcgtttcaaacatggcgactagtgctgctactagtattcctacaaaacatta

SEQ ID NO: 4163 - DNA, 255 bp, Cyanidium caldarium
  Clone ID: LIB190-024-Q1-E1-C5
agtaaaaggtaagaaagaggaaaggtttacgagagaaggaagtagaaagaagagagtgtaaggcggcgtcataatagaaatccgaaaggagtagaagaaaagagagagaagaaagaaaagaagagaaaaagcccagaagccaagataaggtatcaaagtaaagaaagaaggaaaaggagaagaagagagggtaggcttagaagcagcaaaccagagaggaaagcgttaaagcatgaaagaaaagaaatccgaaaa

SEQ ID NO: 4164 - DNA, 432 bp, Cyanidium caldarium
  unsure at all n locations
  Clone ID: LIB190-024-Q1-E1-C8
gggccaacccacgcgtccggtaccgtacaagcgttcagaagaagaaaaatggagccaagcaggtgaaaaaagatggcagttattcaaaagactggaaaaagagaatgctactgcccgctttttcttacaaaacaaagctatttttccaggtgctagagttttggaactggcttgtggttccggagaaaccactttgcaagtagctgcgaaagtaagaggctattctgtaccttcaggagagaccacgggggaagtggtggataaattgttggatatattacgtccatcttatcaccaggaagggaaactggatggtgccagcaatagtggttcggtagtaggtgtagatatcgccaaaggaatgctgaatgtgttcagaggcangttggaaaatactgttttgaaagatcacgtgcaacttgtanaaagtga

SEQ ID NO: 4165 - DNA, 386 bp, Cyanidium caldarium
  Clone ID: LIB190-024-Q1-E1-C9
gaaaaaaagaaccaaaaagttcaaacgtttccagtcggataggtttaaaagagtcaaggaaagctggaggaaaccaaagggaatcgactgcagagtgcgtaggcggttcaagggttctactttgatgcccaagatcgggtatgggacagataagagaacgagacacttgttgccaaacggtttctacaagtttgtagtaaataatgtgaaagaattggacgctctacttatgttgaaccgcaaatatgcagcagaaatagcgcacggagtatccgcaaagaagaggaaggaaattttggaacgagcggcggagttggatatcagagttaccaacgcacgtggaaagttgagagctcaggaagctgaataaaaatcgtctatttact

SEQ ID NO: 4166 - DNA, 486 bp, Cyanidium caldarium
  Clone ID: LIB190-024-Q1-E1-D5
cgctgcaggtgccggtctagaattcacgggtcgacgcacgcgtccgtgatagcccttttttctcttaattgttttttctctagttcagctgtccttgtgaagtactttattgttacccaggttcaatatgcccaaagctgcgagtaaggaagagaagcccgcctcaaaacgcgctgtatccccctacaacgaatatatgaagaagatgcttcccgtcataaagcaacaaaaccccaatctttcgcatcaggaagcttttaagcgttgtgctgaaagttggaaagacgctccagagaatccaaagaaccaggcttcagcctaagttaggggttttctttgaattggtgtttctcaacaccaccaggagaaggaactagtctattttataattccctttgtgtcttcaagcacggaatatgaggagaggtaaacttttgtcttatttggtccgtatgagtagttgcgtgtttgttacataaaatcact

SEQ ID NO: 4167 - DNA, 452 bp, Cyanidium caldarium
  Clone ID: LIB190-024-Q1-E1-D7
aggtaccggtccagaattcccgggggaagacaaaaattttatggaaaagtttcaaaaactggagaagatcggtgaaggcacttatggagttgtatacaaagcaaaagacaaatatacaggagaactcgttgcactgaagaagataaggctggaacacgaggaagaaggagtaccttctacagcaattcgcgaaatttccatattgaaggaattgcaacatccaaacattgtgaggtaagcatggagtgatgagagttctttgagtatattcgttgttcagacttcgagatgtgatccacctggactccaaactatatctggtgttcgagtatctggaacaagatttgaaacattttatggatagtttaccccctggaaagctagaccctcttctaatcaaatcttatttgtatcagcttctgaatggtttggcgtattgtcacgcaaaccgt

SEQ ID NO: 4168 - DNA, 356 bp, Cyanidium caldarium
  Clone ID: LIB190-024-Q1-E1-E11
gttcagcactacgtagactccaaaggtgtttcttattacgggtttgaagcctggtggaagtgggtagctgatggttgtccacctcgtccttccaaagaggaagtcgctaaaaggacacgccagtctggtcagtttgttcgaaaggaccaaccaagctcacaagacctttcagcttggaggtctatgggagaaacttattatcctgagcgaaagagtcaagaaacattagacgctgaagaacttcaacaaaggaagagcatgaataagtcgagttcggaacgaccaaaagaaaatgttgcagctgcatcatagttgagtttgtttctatcataaacttattattcaacgtgaaaaat

SEQ ID NO: 4169 - DNA, 421 bp, Cyanidium caldarium
  unsure at all n locations
  Clone ID: LIB190-024-Q1-E1-F10
accgacacaggtactcgaggagaaaggagacccaaattaaggtgagagaatggacgataaggaactaggcaaaaggatatggtatctgcggtagaacatatgaaagaagcagcaccgactgtttagcaaaaacacagcactctgcagaaaagagaaaatgtaaagtatagagtgtgcggcctgccaaatagtagagaagaaatcgatgaaagtgaaagcgagtaaaagatgaggtatagagaatggcggtcctaacggtaaggatccaaaggtagcgaagtaaatagacgtttgaaaggcgtccagtatgaaaggagaaacgagtgtagcactgtctagtcgtccaactcagcgaaacagcaataactgtgaaaatgcagtaaactagcagtangacggaaagaccccataattcttgact

SEQ ID NO: 4170 - DNA, 381 bp, Cyanidium caldarium
  Clone ID: LIB190-024-Q1-E1-F12
ggtaccggtccagaattcccgggccgacccacgcgtcaaggaaaggagagaaagaggaaagggatgaaatgcagagatctctagagaaaggcaagaaagaaaagaaaggaagacacagtaaatgaggcgagaaagcataggaagtgaaacggattaggaacccgtgtagtctatgcagtaaaagaaagaatgagtaagaaaaaagggagtcattccaccaggggagtaaaggcgcaagaaagaaacccaaagcaattgacgggaatcggaaaaaggggtggatcacgtaaattaatccgatataaaccgagaaccttacctctccaagaaggtgttgcacggctgtcgaaagaacgtgctgtaaagaatggaacaagaacg

SEQ ID NO: 4171 - DNA, 264 bp, Cyanidium caldarium
  Clone ID: LIB190-024-Q1-E1-F2
cccacaagcaactcgagaagacatactaactcacctacaaggagcatttaagggtaagcgaaatcgtggacagttacggaaaaaatatgaaagttacgagaaatccggtaaattacctgcaggtgcacctagaacaaagacaaacttgtaaaagtgaatttcgattttactatgcttctcttttggaaatacaacataattgtgtgaaagtaactttagcaataaagaaatcgagttgtgtggaaaaaaaaaaaaaaaaaaaca

SEQ ID NO: 4172 - DNA, 482 bp, Cyanidium caldarium
  Clone ID: LIB190-024-Q1-E1-F6
aggtaccggtcgagaattcccgggccgaccaacgcttcggcttcggctgcaggtggaatagacttttccttaaaccctcgatggaaaccatgtgctcaggtataaagaattccttttcttgataccgatgatgatgttcattccagtttggacgacgatgaacgtcaatcacttcgtgccaactttttaccccccgcattcgcacccatccaacttggagcacacgacgataacagtgcagatgactggcaagtgaaagaattgaccgcttctagtccagtgttgaccaatcatccccacataaagcccagtcatttgttggttgcttcagaggaaacccacaaactgcgcagaaagttgttgataggtgccaaagtagtgattgtgcaagctggatattcaggaaagcgttttatacatgaaagactgaaacaattgggagttgaactgattattcaggactggacatacagttgggcacc

SEQ ID NO: 4173 - DNA, 377 bp, Cyanidium caldarium
  Clone ID: LIB190-024-Q1-E1-F9
ggatggaatgttttcattttctaggtttcaatattttgtgtttatcccagtctatctggttcctgccgaagcatttccaactcgaattcgtgcgactatgtatggcatctcttctgctcttggcaaaatgggtggaattgtaggcacgacaacttttcctagtatttggctgcgatggtctggaggagtttccaaaaccaacgagggacttcgaaagacgatgtggttttatggtggtatggaatatttggcattcatcatttgtacgctgtttgttcctgaatattctcatcgttctcttattggagaagatacccgttttgttgagttgagaaggagacattgtgctcgttttgctctacgttggaatgtcacct

SEQ ID NO: 4174 - DNA, 451 bp, Cyanidium caldarium
  Clone ID: LIB190-024-Q1-E1-G10
aggtaccggtcaggaattcccgggctctcaatgaaggaaggattggaataagtgctcagatgactggtttggctcaaggtgctttgaatattatctttccctatttgcatgaaaggaagcagtttggacagcgcattggagactttcaaggtgttcagtttcaatatgcagaagccatggtcaagttggaagcagctcgtgccttgttatacaatgcctgtcgaaggaatgatgcaggctttgatattaaaaaggaagctgctattgcgaaatattttagtgctcaagcagcggaatggatagcctcgaaaagcatcgattgggctggaggtatgggctttgtgaaggagtttggtttggaaaagtattatagagacaccaaaattggtcacatttatgaaggaaccgataatatgcaattacaaacgatagcaaaagagatgcaaaagga

SEQ ID NO: 4175 - DNA, 461 bp, Cyanidium caldarium
  unsure at all n locations
  Clone ID: LIB190-024-Q1-E1-H3
aattcccgggccgacccacgcgtccatgaatataatggaaggagaatggtaatgtatggagtaataggagtaatgataatgatgacgttaagagggaagggagtaatgggagtacatgtaggaatgtcatggttagggataagtagtgtaataataatgggaataatgggaatgataaatgtggtaagtaggtcatataaaagcatggagtatatggagaggataagagaagagagtagggtgtatgtaggaatgagtataataacaggaatgatatggagtaaagaagtgtggggatcatggtggataaatgatgtaaggaatataagcatgttagtatgctggatatggttggaagtaatacgaggagtaaagaaggagtacagaggaataataagcagtataggaataataaatataccgataataaagtactcagtanagtggtggaataccttgca

SEQ ID NO: 4176 - DNA, 399 bp, Cyanidium caldarium
  unsure at all n locations
  Clone ID: LIB190-024-Q1-E1-H4
cgggtcgaccacgcgtccatttggttgttttcttggtaggaattgtagattccccatgggcaaaaaacctaattttaaacccaaaggggaaaattccttgccctgggaaattccaaattgctttggaattgaaaaataccacctataaatacagggttaacaccttggtaaaaaacggaggtaaccattgggaatcggattatgaaaaactcaacccaattcacactgtgccaactttggccttggacggtcaaacaattgggcattcatttgccattatggagtacttggaaaagacccggccacaattgcccttgttaccaaaggacccggctcagcgagcaaaagttcgtcaggtantanaaacagtaaatgcggatacacaaccactgcaaaatt

SEQ ID NO: 4177 - DNA, 449 bp, Cyanidium caldarium
  unsure at all n locations
  Clone ID: LIB190-024-Q1-E1-H5
ggtctaaaattaccgggtcgacgcacgcgtccgcggacacgtggggaagagaagagagaatgctgggtggagtagcgaaacaagagaagggaagtaaaaggtaagaaagaggaaaggtttacgagagaaggaagtanaaagaagagagtgtaaggcggcgtcataatagaaatccgaaaggagtagaagaaaagagagagaagaaagaaaagaagagaaaagccgtactgaagaccgacacaggtactcgaggagaaaggagacccaaattaaggtgagagaatggacgataaggaactangcaaaaggatatggtatctgcggtagaacatatgaaagaagcagcaccgactgtttagcaaaaacacagcactctgcagaaaagagaaaatgtaaagtatagagtgtgcggcctgccaaatagtagagaagaaatcgatgaaagtgaa

SEQ ID NO: 4178 - DNA, 295 bp, Cyanidium caldarium
  Clone ID: LIB190-024-Q1-E1-H8
tcttgggagcagttgtacattcaacatcatcaaatgccaaagggaggaaagaaagattcttcaaagaaagaagccacaagtaaacctgcagcagcagatgctacaaagacgacagaaaagtctggtccggaagccaagttgaagggaactggtgcaaagaaacaataaaaagttgactatgcatgtgcagtcctgttatgttttgtgagttctgtttgatagtttccagctattcttttggtagtgaataaagagaaaattttttatatttaaaaaaaaggaaataaaaggaggg

SEQ ID NO: 4179 - DNA, 346 bp, Cyanidium caldarium
  Clone ID: LIB190-026-Q1-E1-A7
tacaacaccctatagtgagtcgtattaatgacgcatgtcggaagtgttgtgagcagagaaagatttgaaacgcgcctttgagttggatccttccaatgtagcattgaagaaaaagatgcgcgaacttcgccaagttaaggccgaacaagatgcaaaggatcgcaggttatttggaaatacgtgtgcacgtttaggacaaattgaagacgatattcataagaaatcaaacgaagaaaccaaggccaaagaaatcactgcctctgaatgagctcaactttttttacttgcagttaccatagaaagaggatctaacatgttgttttagttttacaacagacaagagacc

SEQ ID NO: 4180 - DNA, 425 bp, Cyanidium caldarium
  Clone ID: LIB190-026-Q1-E1-A9
acaataccctagagtgagtcgtatgaatatcgtgtgaagctcgacagcgtctctacacaaacacgcaaggtttcttggcgggaaatacttgcgactactagggtcgttactttaaagagaaatgtgagagcactggtcaagttttagtggacttgtgagggtattgcttatgagagccaacctgtggtgtcagttgtttatctggcgttagaggaagacgtgtgaaaggagagctttcctttatcggacaaggcagttgtaccgaaaaaacacttgtgacaacctgactcgattttactgatagatattccgttcggttgtttttgtattgctcgtcaagtcttgaacagagctggtttttatattttgatgacaaacaggacgagtttcttggtttttgaagtaacttttccgtctccaaaact

SEQ ID NO: 4181 - DNA, 417 bp, Cyanidium caldarium
  Clone ID: LIB190-026-Q1-E1-B10
caatatccctatagtgagtcgtattatatgccaactcgattaaaacacagtagaaagaagagaggacacgtttctgcaggtcatggaagagtaggaaagcacaggaaacaccctggaggacgaggaaacgcaggtggccaacatcaccatcgaactttatttgacaagtatcatcccggttattttggaaaattgggtatgcgatggttccatttgcaaagaaatacactttattgtcctattatcaacgtcgatcgactgtggtcacttgtacctgaaaaagagagagagcaaccgataaagaaagatcaagcaatagtagtggatgtagtgaagcacggtttttataaagtgttggggaaaggcaagttaccgcgacaaccgttgatagtgaaagccagattcttttcgaaatta

SEQ ID NO: 4182 - DNA, 377 bp, Cyanidium caldarium
  Clone ID: LIB190-026-Q1-E1-B12
caatactctataatgagtcgtattaacgcgtccgcccacgcgtccggagactcactcattttctctttgttttgtcttttgtagctgttttcctcgtagctcatgcagttcccgttggagaagatgcattcagtttcagtcagacttttggaaatgcttctgcttcaggcaacgcctctgttattccagctacaaccaagatccccaagttagaagtaactagtagtgcctcatcaaaggacaatggaaaagcagctcaagtagactttgcagattactcaaagggatatccttcgcctagctatttttacgctccttcctacacatcctatgtggaatttcctcaatatccatcctaaccatcatgggcttccttt

SEQ ID NO: 4183 - DNA, 130 bp, Cyanidium caldarium
  unsure at all n locations
  Clone ID: LIB190-026-Q1-E1-B5
tatagtgagtcgtattatnattaataaaaaaaaaaaaatataagtaaacaaaaaaaataaaaaaaaaaaaaaaaaaaaaaaaaactattaaaataaaacaaaaaaatactaatgggaagggggttcgggt

SEQ ID NO: 4184 - DNA, 437 bp, Cyanidium caldarium
  Clone ID: LIB190-026-Q1-E1-B7
acaataacctatagtgagtcgtattacgacgctagttttttgtgttctcattcgatggataatacgatacgtatttgggatgttcgtcctttctttcaaggttctgatgaggaacgttgtctaactattctaagaggtgcttcccattctttcgaacgtaacttgttgcggtgtcgtttttcttcagatgggactcttgtcggtgcaggaagtgcggataagtttgtatatatttgggacgtggatagtggagagttgcaatatgctttacctggtcacgatggtagcgtcaatgacttggctttccatcccaaagagtctcttattgcaagtgcaagtagcgataaaactatttatattggagaaatacaaaagactgaataagttaaaattcgtattcacaatattatctataaatataggaaaatgaagcaacg

SEQ ID NO: 4185 - DNA, 370 bp, Cyanidium caldarium
  Clone ID: LIB190-026-Q1-E1-C7
ctatagtgagtcgtattaacgcgtgggggccgcatctcgtcgacggcctgacgagcatggcagcagcggtagatctactttctagaggcacagcgatgtgtgacaagtggaaaatgaagagaatcacgacgcttgaggcgcaagagaagatggatgagacagcgttccaagtatcggaggaattcctcggacgtctgatttgaggagagttcctaaaacgtggatgagctctttgtgcaactctggcgcagtgagtataccctgctacggaaggttggaattgtttccgaggattgttcgcaagttatgatataaggttcttgtggtttttgttttcaccttggaaaactcagtctagagaggaaagagg

SEQ ID NO: 4186 - DNA, 312 bp, Cyanidium caldarium
  Clone ID: LIB190-026-Q1-E1-D10
acgcgtccgtaaggatgttttcttggtagcagttgtacattcaacatcatcaaatgccaaagggaggaaagaaagattcttcaaagaaagaagccacaagtaaacctgcagcagcagatgctacaaagacgacagaaaagtctggtccggaagccaagttgaagggaactggtgcaaagaaacaataaaaagttgactatgcatgtgcagtcctgttatgttttgtgagttctgtttgatagtttccagctattcttttggtagtgaataaagagaaaattttttatatttaaaaaaaaaaaaccgagacca

SEQ ID NO: 4187 - DNA, 451 bp, Cyanidium caldarium
  Clone ID: LIB190-026-Q1-E1-D8
tagagtgagtcgtattagttgtatgtggaaaccgcatttgtctgcatttctcataaaccaaccgtcgatcctacctgcagttttatccactaggaatccattcgttgttcgtcgacgtttgttgcaaacaactttgtgtttcaaagcatcatcttcgtacggagatatgggttcacctactgcatccaccaaaaaccttgtggtcgacagacccaagtccatgaactatgaagcagtcttggactttttattgcaaaagaatgagcagtttcaacgaggtttccaaacaggtactattttagaacacgaaacgttacctgaatatcgccaagcgttggcacaaggtggacagaaacctattgctacgatagtgacgtgttgtgactctcgcgtcatcccagaagcaatctttcaacaagggtttggcaaactgtttacggtaagaacagca

SEQ ID NO: 4188 - DNA, 393 bp, Cyanidium caldarium
  Clone ID: LIB190-026-Q1-E1-D9
tacaatactctatactgagtcgtattaagaggaccgaatcagggtaagaggtagaggaccaagacgagaagagagaatgctgggtggattagcgaatcaagagaagggaagtaaaaggtaagaaagaggaaaggtttacgagagaaggaagtagaaagaggagagtgtaaggcggcgtcataatagaaatccgaaaggagtagaagaaaatagagacaagaaacaaaagaagaggaaagccgtactgaaaacggacacaggtactcgaggagaaaggagacccagattaaggtgagagaatggacgagtaggaactacgcagaaggatatggtatctgtcgtagaacatatgatagaagcagcacctactgtttagcaaaaacaaaacactct

SEQ ID NO: 4189 - DNA, 280 bp, Cyanidium caldarium
  Clone ID: LIB190-026-Q1-E1-E11
ctctagagtgattcatatgatgacttattggtttacgcgcaactcgaactttttaagacgcaaagccatatctatttttagtattgtgggatttgtctggttaggagccatctgcatggcgattatcggagcgtgggcctaagaataaaatttgtttgagacgtcgtggtgcagatgactcgcatgtttggtagttggttcaagtttgacaagagaaaacatttgttgctacttcttacaaataaaaaagttcaaggacaaattgtagataaaacaaaat

SEQ ID NO: 4190 - DNA, 327 bp, Cyanidium caldarium
  unsure at all n locations
  Clone ID: LIB190-026-Q1-E1-E12
ttctggaagaacataagtatggagaatggacagaggaagatattgagctctttgttcgtgttgccanaacatacggaagcggtgacaaatggggactatttgctagtcatattcctcatagagtgggttatcagtgtagtgcagcgtatcgtgagatagtgattcctcgaggacttataagagaccctaactttaaaatgactagaaatggtaaagccgtatacgttggaaagtatcatcactaaatgttacttttgttggctacgacatttctgaaatgaataaaagccttttgcagtcttttcaacgcaaaaaaaataaaaagaa

SEQ ID NO: 4191 - DNA, 435 bp, Cyanidium caldarium
  Clone ID: LIB190-026-Q1-E1-E7
tacaatacactatagtgagtcgtaatatcgtttgacgttggtgcctcattaagccatcgttgaactacatcttttatctcttagcacaaacacaaattaaagaacaatgcgtgaggttatttctctacatattggtcaagcaggtgttcaagtagcaaactcttgctgggaactttattgtttagagcatggtgtcaacgctgatggaaccattgataaaaagggaaacacagcaaacgaagaagcttttggtaccttctttacccagacaagctcgggacgatatgttcctcgttgtgtatttgtcgacttggaaccttctgtcgtagatgaagttcgtaccggtgcctaccgccatctctatcatccagaacaacttatttccggcaaagaagatgctgcaaacaattatgcaagaggacattatactattgg

SEQ ID NO: 4192 - DNA, 104 bp, Cyanidium caldarium
  Clone ID: LIB190-026-Q1-E1-E9
tacaattctctatagtgagtcgtattaacgcgtgggcggacgcgtgggaaaaagaaaaagaacaaagcaaaaagaaaatacaaatataaaaaaactgaaaaaga

SEQ ID NO: 4193 - DNA, 435 bp, Cyanidium caldarium
  Clone ID: LIB190-026-Q1-E1-F9
cacgcgtctgtagaaatccatgaaagtgaaagcgagtaaaagatgaggtatagagaatggcggtcctaacggtaaggatccaaaggtagcgaagtaaatagacgtttgaaaggcgtccagtatgaaaggagaaacgagtgtagcactgtctagtcgtccaactcagcgaaacagcaataactgtgaaaatgcagtaaactagcagtaggacggaaagaccccataattcttgactagataggtttagggaggagagagaatcatgaagtagaggaggtggggtaagagatgaaagaccactgcatgaggataaggaatctaactgagtaaggaaaataagcttaagctagtttggctggggaagtaaagcctaagaaagagtaaattaggcaagcaaaggcatgagagaagtataataacagaagcatgcttgag

SEQ ID NO: 4194 - DNA, 352 bp, Cyanidium caldarium
  unsure at all n locations
  Clone ID: LIB190-026-Q1-E1-H3
gtccgaaatagtaaagaagaatcgatgaaagtgaaagcgagtaaaagataggtaaagaatggcgcccaaaataaagatcaaaagtaccaaataataaacgttttgaaggctccagtatgaaaggagaaacgagtgtagcactgtctagtcgtccaactcagcgaaacagcaataactgtgaaaatgcagtaaactagcagtaggacggaaagaccccataattcttgactagataggtttagggaggagagagaatcatgaagtanaggaggtggggtaagagatgaaagaccactgcatgangataaggaatctaactgagtaaggaaaataagcttaagctattttggct

SEQ ID NO: 4195 - DNA, 308 bp, Cyanidium caldarium
  Clone ID: LIB190-026-Q1-E1-H5
tacacgcatctacaagttgtcgtcattaacaggagctttgcaatgcggataaagatgtactggaagagactttaggatcgaacaatgcgaagatcttccatgattttgtccatgcaactgcaccaaatttgtacgaaggacaatttaaataggaattttatgacttattttgttgtttgcaacgaaaaagataaagagtgacttgcaagctaaaaaaaaaaaacacacaaaaaaaaaaaaaccacaaacacaaaaaaaaaaaaccaacacacaaccaaaacaacacaacaacacaaaaaaaaacaaaa

SEQ ID NO: 4196 - DNA, 405 bp, Cyanidium caldarium
  Clone ID: LIB190-026-Q1-E1-H7
cacgcatccgccagcgcgtccgcccacgcgtccgcaagtatactgttctgccaacgtttgtccacacttgggaacaccattggatcaaggaacggtatctagtggtaacttgatatgtgctcagcataagacttcttggaggctatccgatggaaaacttgctggaaagtggtgtccttatccacctatcttggggccgctgttgggaaagttgaaagctcctcaagacttgacggtctttccagtcagagaaatgaacggttttattgaggctcttattgacttggatgctgctaaagagtttgaaagtaactattggagaggaatattggacgctcaaggtaaagctactggtggatattattaaatagcttgtccctaataaagtttctgctggattgttgg

SEQ ID NO: 4197 - DNA, 322 bp, Cyanidium caldarium
  Clone ID: LIB190-026-Q1-E1-H9
ccacgctgtccgcgaaatgtcctatttcagcttcaaggtttctatcctgtttctcttccacagacaacaaagtcgagactgttgtgcatcttactgtgttgcctcctttgctaccaatgcttatttgcggtagaatcttcgagcaatgcgtcttgtagcagctcaatgataatactgtgctattagaatgaactgcaccaaagcacgttatacttagtaactagttattttgtccagcggaataattttatctgtgttgcacttgtagcaatgaaaacacctagagtcgtgttaaaaaaaaaaaaaaaacaaaacagaaaat

SEQ ID NO: 4198 - DNA, 308 bp, Cyanidium caldarium
  Clone ID: LIB190-027-Q1-E1-B12
gaagactggaccaaggaaaagtatcaaattcgattggctattacgccgtatttacaagccgaacaggaccgtttggaagtgaaagagacgcatcgtcgtcttcgtcaagaagcagaacttatgacggatgtgcctgaatatcaaccgggagaaaatttgtacaaaacaagagagtttactccctatgtcaaaccgctagtacctggagttggtccacaaggactttgaaagttatctaaagtgatggttgccaataaagctggaatggagtttagttttgtgcaaaagaaaggtatgcataaaccaac

SEQ ID NO: 4199 - DNA, 281 bp, Cyanidium caldarium
  Clone ID: LIB190-028-Q1-E1-C5
gcgtccgggcgttcagtatgaaaggagaaacgagtgtagcactgtctagtcgtcaaactcagcgaaacagcaataactgtgaaaatgcattaaactagcattaggacggaaagaccccataattcttgactagataggtttagggaggagagagaatcatgaagtagaggaggtggggtaagagatgaaagaccactgcatgaggataaggaatctaactgagtaacgacaataagcttaagctagtttggctggggaagtaaagcctaagaaagagtaaa

SEQ ID NO: 4200 - DNA, 275 bp, Cyanidium caldarium
  unsure at all n locations
  Clone ID: LIB190-028-Q1-E1-E10
ccgcttggtcttgggnnngatccacnncccagncgacgctctcaggtcgcggncctcccncttggccggttggcactgttggcagtgggaggctttcttcctcacatgtttctcactcatcaaggtgtggtggaacaactaactcattttcgttcgttgcctgttggtgggggtgcttgaggtatgtgtgtgtgtgtgtttgtgtgtttctgtgtggaataataatgcagttggaccatcgaaataaaagatggttttgacatataaaaaacaac

SEQ ID NO: 4201 - DNA, 373 bp, Cyanidium caldarium
  Clone ID: LIB190-028-Q1-E1-E4
ttttcctcacttggctttctcgtacgttctctcacttcacagcacgttctttcgacagccgtgcaccaccttcttggagaggtaaggttctcggtttaatcggattaatttacgtgatccagccctttttccgattcacgtcaattgctttgggtttctttcttgcgcctttactcccctggtggaatgactcacttttttcttactcattctttcttttactgcatacactacacgggttcctaatccgtttcacttcctatgctttctcgcctcatttactgtgtcatcctttcatttctttcctgcctttctctacacatctccgcatttcatcgctttcctccttctctcctttcccttcacttttaca

SEQ ID NO: 4202 - DNA, 167 bp, Cyanidium caldarium
  Clone ID: LIB190-028-Q1-E1-H3
agagggaaaacttgtttattgaaagacacgtatttctttggttgtacaaacgttaactggcatggatatttctaacgttgtccctacttcaactacgcagaggacgtacttttcccctggccatggtatagcatgcatccacttgtgtttgtccacgctctatgcac

SEQ ID NO: 4203 - DNA, 451 bp, Cyanidium caldarium
  Clone ID: LIB190-029-Q1-E1-A12
ccacgcgtccgcaagaccgagggttggaacggaatcgaatttaagttgccttgtttttgtcccgttggaacattgcaaggtttccatgaatatttaaaatgtcctcctcagtgcaaaaatatttagtgaatttggctacctatgtgaccatcaaaagaggggatataacgaaagagcaagttgacgctatagtcaatgcagccaatgaacaactgacggtaggtggaggtgtaagtggagctattcatatagctgcaggtccaaaatatacggaagcctgtttaaaggttcacgatgtaatacggggagttcggtgcccgactggagaagccagaatagtgacaggagggcagttaccagctccatatgtcatcaatactgtgggacctgtttattctagtgttccaaatcctgcagagttgttggaatcctgttacagatctgttttgca

SEQ ID NO: 4204 - DNA, 514 bp, Cyanidium caldarium
  unsure at all n locations
  Clone ID: LIB190-029-Q1-E1-A8
cggaattccgggatcgaccacgcgtccgcccacgcgtccgcccacgcgtccgaatctttgtggattttcctgggagagagagagagaaagagcgggaaaaaaagagagagagtgtccctcctccttgtgtgtcggttttggcgggaaaacaactgctccctgtggctattttcgtgtgttgtcagatcctaaggtggacgctttcatgtccattcctgacgttttaaaatatacaaagcaaaacggggaactagacgctactccctatatagaagaatacaatactttttatcagcacggctacgagtccatagaagatagacaactaaggcagtcacagaaagcaaaagaatgtatatctagtttttataacctagtatcggacttttatgaatatgggtgggcaacagagttttcactttgcttatttacaaaagaatgaacctctggcgtgtggattgttacgctatgaatacgtgcttccgtggaggatgaaagtacancgtangataga

SEQ ID NO: 4205 - DNA, 456 bp, Cyanidium caldarium
  Clone ID: LIB190-029-Q1-E1-B10
gtccacccagcgcgtccgcacacgcgaccgcccacgcgtccgcccacgcgtccgctcctcctcaagttggtttctcgaggattatttccttgcaccctaaatattacttttatatacaacctataacatggagcacaagtccaaaatgtgtagtaaagaaacaaaagtcaaccaactttcgacatacatggtatatgggtgataatcatagctctcgtccaaagagcaatcgttttcatatttggttaaagtccttgacaactggacgcatatttcatcgttcaagtggtggtactggttctgttggtggtggaatgggtggaggtagtggaggtggttcaagtagtgcaggagggaagggaaaaggtggtgcgcatcctctcttggctttctggatgcgttacaatcgactgttagagtcgcgtcctttattgaccaaagcacttacttccttga

SEQ ID NO: 4206 - DNA, 323 bp, Cyanidium caldarium
  Clone ID: LIB190-029-Q1-E1-B11
ttccgaggtccacccacgcgtccgcatattatcacgtgaaaggctatccagttgataattctggaaaatctgcaatgtattgatatgtgataagaatggcaaggcttcagtttccttgtatatactgagtggaaacaagctaggtatcaaccccaaaggttggaatacacccaacgcttctcgcaaggggtccaatgttttactgataataatgcctgaaaactcaaaatgtttgttgtttcaaaggacaagcttcttatgaaaacgtaaaacctcctccataaaagcaaccttcgacaaaaaaaaaaaaaaaaatccaaaaa

SEQ ID NO: 4207 - DNA, 324 bp, Cyanidium caldarium
  unsure at all n locations
  Clone ID: LIB190-029-Q1-E1-C10
cagacgcgtgggtgcgtgtcgaggagcaaaacaagatggacggctttcaacagattgtctcacctttttccaactttatgatagaatcttatcgtttgttgaggcgttgtacaaagccagaccgtanagaattcctcaagactgccggagcaactgcagtcgggtttctggttatgggattcattggctttttcgtgcgcttaatacatatacccataaacaacatccttttgagctaaaaagatggacacgttgttgtgttggactcgttttgtcttctcattctttgggacgttttatcgaaaaacgctgtttttcttaaaa

SEQ ID NO: 4208 - DNA, 458 bp, Cyanidium caldarium
  Clone ID: LIB190-029-Q1-E1-C11
ttccaggtccacccacgcgtccgcagacgcgagggcggacgcgtgggcggacgcgtgggcgggagaagaaatacgaccttttccttcttctgttgtgggaattttctcttggtacgaaaatactccaaaacaaagagcagacaccgctgttgtaattgcctcaagactatgtctctttataacaagaatatactggatcgattcaagttggatggaaaaatagctctcgttacaggtgcagctcaaggaataggaaaagcactagccattgcgctagctcaggcaggagctgctgctgtaggtttattggacttggagtctgagactcttcgtcatacggaaaaggagctcaacgcccacttttcttccactcaaatattggctttggtagcagtaaggaaggatatcaaccactgtgttgtgtactttggaagagattcttttattaaagcacactg

SEQ ID NO: 4209 - DNA, 456 bp, Cyanidium caldarium
  Clone ID: LIB190-029-Q1-E1-C12
gtccacccacgcgtccggcaaagtatgaatacaggtggtgctgagaatttttcaccagcggatatacaaaatttaatgaagcaaaaacttcaggaactcaaaacaactattgagatagttcaagaacaatttcgagacccaacccgcaccactttcatctgtgttacgatagcagaagctctttctatatatgaaacggagcgtcttgtccagcaactagcttcttacgagatggactgtagaaatattgttgtcaaccagttattcgacccacaggaggaacaaaagagtgaggcgctattgatccgcgctagaatgcaacaaaagtatttagatcaagtgcaccaactctattccggcgaaatgtgcctcattaaagcgcctcttctgcctgaggaattgaacggtttggaacaacttgaaaagttcgccaactacctgaaacttgaagagcat

SEQ ID NO: 4210 - DNA, 540 bp, Cyanidium caldarium
  Clone ID: LIB190-029-Q1-E1-C5
ggaattccggaatcgaccacgcgtccgaacttccttcagaacttccttatagtttggcaatggagcttaataagggttcttcgtcggaacgaccatcgaacgagtatccaaaccacacatcgcaagatcctgaaacattgcgctctcatattgccgatgccaagttacagactgaacaaacaaagcgaaaagtgaaagaaattcaagagaaaatggctcggttacgtagcgagaagaaagtgcttcaggatcaaatcaagtcgtacgatactgaaattcaacaaattcggtcgcagcttagtgatgaacaagctaattactatgtggaaacttcctttttcccgaatgaaatggaaagtcgtcgaatggatggaggagacaagattagcaacaagaagagtatcaacaaaggaacggagagtcttccttcttctgaacctacaacggaggacttgccacctccgccatcttatgacgaaattgttggttccgcaagtcctccgaccaactctcaaggcaagtcagcaagtcctccaacct

SEQ ID NO: 4211 - DNA, 448 bp, Cyanidium caldarium
  Clone ID: LIB190-029-Q1-E1-D11
tccacccacgcgtccgcacacgcgtacggaagaaaatggctccaaaaggtgcaaagagtgttcctgttgcaggcaagaaaccaatcaccaaaagtgataaaaagtccaaaaagaagaggtcagagtcctatgctatcgacatttacaaggtcttgaagcaagtgcatccggatactggcatatcctccaaggcgatgagcatcatgaactcctttgtgaacgatatatttgaacgtattgccagtgaagctagtaaacttgcagcttattccaagacgaagactttgacttctcgtgaaatacagactgctgtacgtctgttgctccctggataactcgccaagcatgcagtttcggaaggtacgaaagcagtaacaaagtacacttcttcgtaatacgtactttgaacatatggtgtttgtcaacaccttttttgggaggacttgtc

SEQ ID NO: 4212 - DNA, 452 bp, Cyanidium caldarium
  Clone ID: LIB190-029-Q1-E1-D12
gtcgacccacgcttccgatcgatcccaagagtgcagactttcgtcgcattgcatcggaagctgcccgcactattcctggaagagaaaatggtggcaactgcgatatcaaaaacttgagtcgaggaagtagagtttacttgcctgtgtttgttccaggagcaaacttttcgataggagaccttcattttagtcaaggagatggcgaagtatcgttttgtggtgcgattgaaatgtcgggttatgcaattcttcggtgtcaaatcattcgccaaggaatggaccgttacttgagtccgatgggaccaaccaaactacatgtgaatcctatcttcgaagttggacctttggagccgagatattcggaatatttggtatttgaaggtgtttcggtggatgagtacggcagacaacattatttggatgcatccgttgcctacaaacgagccgtgttg

SEQ ID NO: 4213 - DNA, 434 bp, Cyanidium caldarium
  Clone ID: LIB190-029-Q1-E1-E9
ttccaggtccacccacgcgtccggaagattaaacggaatacaactggcctcggtctactcccgcctaacaactaccttcacaaggaagctctttttgaggctttgtaacttctaaaaaacatgtgttttaacgggataacgttgtatttgatgacttttgtgtctttttccaagtgaaaacacccaatcctttaacaaggagcacaagagtagaaattatccggcgggcttgtaagataatttctgttgcccaaaagaatcttgctgtagcaagtgtccgcttttagaaaggaaaagaaggttttcttagaaatatatttagagaaaaatcttgttccatattcccttactctcgtatattcaagttcttccaagttctaccgtcaagagggaaaattcaagggaaactgagcactacggttttgtttgtcaaa

SEQ ID NO: 4214 - DNA, 464 bp, Cyanidium caldarium
  Clone ID: LIB190-029-Q1-E1-G2
cggacttccgggatcgaccacgcgtccgcccacgcgtccgcccacgcgtccgaccaatgggagaatgaaataagagcatggaacaacaacaagatgctcgaaaggtacctccaggctatgtattgttgaaaagttccgatgggtttgagttttatattaccgaagaatgtgccaaagtgtccaagtttctgaaaactacgttggaaagtgggttctccgaggccaagaccggacagttggtactcaacgaaatacctgggcgtttattggaaaaagtatgtgaatacttttattataatataatgcaccaacaaaccgacggaaacttgcctcctttcgagtttcctccagaaatagcggtagaactacttatggttgccaactttctggacacctagaaatgcttgccacctagaagagtaagcaactcaagtatatataaatatgtgcaacaacctttccac

SEQ ID NO: 4215 - DNA, 558 bp, Cyanidium caldarium
  Clone ID: LIB190-029-Q1-E1-G5
ggaataccgggatcgaccacgcgtccgcggacgcgtgggtgctgctgcaacggcagtgcacctttgcaaacttttcgttgtagcgcgtacagtagaaataggcgcatatttgtacttggcaacacttataccacagctatgagtattaaaagtacactgaaagttacttttgtaaccggaaaccaaaataaactggaagaagtacgatcaatactagcgggactagataaggttgttatagagggcaagcacattgatcttccagaattgcaaggcgaaccagaagatatcgccaaagagaaatgcagactagccgccaaagcagttggaggtcctgttctagtagaagatacttgtttatgcttcaatgctttaaaaggcttaccgggaccttatatcaagtggtttctacagaaacttggtcacgatggcctcaatcgacttttatatggttttgaggataagacggcttatgctttgtgtacttttggttttcgatgggagcaccgagtgatgcagttgtgctttgtggtaggacagacggtatcattgtacctg

SEQ ID NO: 4216 - DNA, 436 bp, Cyanidium caldarium
  Clone ID: LIB190-029-Q1-E1-G9
ttcccaggtccacccacgcgtccgcaaacgcgtccgcccacgcgtccggtttgtggtgggaagattgacgacatgccaaagaacaaaggaaaaggagggaagaatcgtcgtcgaggaaagaacgacaatgaagaagaaaagcgggaacttgtgataaaagaagagggccaagaatatgcgcaagtgactcgcatgttgggaaacggacggtgtgaagctttatgtttcgacggtactcgaaggctatgccatattcgagggaagatgagaaagaaggtttggattaatgccggagatattgttttaattggcttgagagactatcaagacgaaaaagccgatattatactaaagtataatccagatgaagctagagcattgaagtctcaaggagaaattccagacaccacgaaaatcaacgaagaagacggtgaag

SEQ ID NO: 4217 - DNA, 461 bp, Cyanidium caldarium
  Clone ID: LIB190-030-Q1-E1-A10
ttccgggtcgaccacgcgtccgaccgtgcatgcgtgttcctcgtcgtgctcctcctggccgccatcgcggtggcaccgttcgcgggcgccgcacgcgtggacgttgtggagggtaggtccatggcatccgccgatgcaccggaggcggcggccgatgctcccgctcctagccccgactccgcctcatccccagactcgtcatcggaggcgccctctagcagcagttcctccgactagacgcaaaaacctcttcattctctggaataactaacagtatatacgttgcaccctgatgatatagaaacatgtacgtgcatcagtgtatggaatgcgagtggcaaacacatggaatgtgcttgcctaattattgtttatttctttatttattatatgtctctctcgtttgttttttatttttcgtaatgcaagtaatataatttgttatacccaatatatataga

SEQ ID NO: 4218 - DNA, 426 bp, Cyanidium caldarium
  unsure at all n locations
  Clone ID: LIB190-030-Q1-E1-B12
taccggtccccccnttccgggtcacccacgcgtccgcaccgcgtccgtccttcctccggctgggccgtcgatcccgttttccatccgggtccaatccgattcagccaaccgctgtgaatgatggcgctaaacctgttcccaccagaccggcgcggccgtggcggcggcaccggcggcaccacgagcggccgtcgtcgcggcggcggccacggcgccacgctcggccgtcgtcgctgcggcggccaccgtggcgccgccgcccgcgtcggcgcccgcccccgctccggcgctccagctgcagacgatgacggtggacccggcccccgcgcaagcgcccgacgcggtgaatccggatctcgccatggcgtgccaggcgctggtggaggccgcgctcgaggcggatcacgccgacgtcgccgccgagct

SEQ ID NO: 4219 - DNA, 234 bp, Cyanidium caldarium
  Clone ID: LIB190-030-Q1-E1-B2
cggtccgtattccgggtcgaccacgcgtccgaataaatttggtattataaacgattatttaaatactgaaaaagattaatcaaaaaatcttgtgtaaccaatcatgttgctcgagcatttgactttgctagtggaggccgcttctgaggatgcatactaaattgcctgtcaattagaagtcctacatcttcgatagtgcactctctcatgacttcgagtcatttcttgataaat

SEQ ID NO: 4220 - DNA, 444 bp, Cyanidium caldarium
  Clone ID: LIB190-030-Q1-E1-B5
taccggtcagtaaattcccgggtccacccacgcgtccgcaaacgcgtccgcgttgattgttaaattatggcggaccatgatcaagtggtagcgtacaagcgttcagaagaagaaaaatggagccaagcaggtgaaaaaagatggcagttattcaaaagactggaaaaagagaatgctactgcccgctttttcttacaaaacaaagctatttttccaggtgctagagttttggaactggcttgtggttccggagaaaccactttgcaagtagctgcgaaagtaagaggctattctgtaccttcaggagagaccacgggggaagtggtggataaattgttggatatattacgtccatcttatcaccaggaagggaaactggatggtgccagcaatagtggttcggtagtaggtgtagatatcgccaaaggaatgctgaatgtgttc

SEQ ID NO: 4221 - DNA, 450 bp, Cyanidium caldarium
  Clone ID: LIB190-030-Q1-E1-B6
taccggtcagacattcccgggtccacccacgcgtccggatggacttgctgctgcaattgtatcacaaccagcagataccgtactttccaaaatcaatcaagtaaagaccgagggttctactgcaaaggcaatcgttacgattatgaaacaactcggtgttcgaaggctgttcttaggaacaggacctcgttgtttgatggttggatggttgactgcaggtcaattcttcatctatgattatgtgaaacaacttcttggcatcttccccacccaacaaagtgcgcccaagacaattgctgcaaaggtctaaaaattttaactaatgtaagatggatggaaaacagactttgttttcctgaaaatgggttcagttgaactcattcctgtgtacttcgttgtttgtttggaatgtttgtcatgggatcattttcagcatggtgacattttttc

SEQ ID NO: 4222 - DNA, 478 bp, Cyanidium caldarium
  Clone ID: LIB190-030-Q1-E1-B7
tacggtccatcattcccgggtccacccacgcgtccggacttatagcgcttcatgtcagttgcatcttttgtttggcttactggtccaactgtcacacatgataataaggagactcgtaatacctgttgtgcacataccagatatggcttgggacgagtactttcctttcggaatcataataggggaccttgcgtggaatctagacgacccatatcacaaggcaggctaaataacttgaccatgatgcccattggtgttcccaaggtagcttaccgtgttcctggtgctcctcaagcagattgggtagatatttacaatcgactctatcgcgaacgtattatattcttaggacaagagattgacgacgagatttcaaaccaaatcatagcagtaatgctctatttagactctgaagataataccaagcctatatatctttatatcaactctcctgaggggttccgttattgccggtttg

SEQ ID NO: 4223 - DNA, 464 bp, Cyanidium caldarium
  Clone ID: LIB190-030-Q1-E1-B8
acgcgtgcatgtaccggtccatcattcccggggtcacccacgcgtccgaagctcttccgtatattctttgtgcttggacaatggttgcaaagactgctctgagttgcctctttcgctctttccttagcgctgccgcagttgcagccgacgtagtttcagaggagagatggggatatgctcagcaatcccaacagcagcaacagtgccaacaagtatgtaaacagtatgcatactatcagagtccagtctgcacttccgtaaccacacagatcccatactggacccaatgctcgaagactgtgcaaacctttgtcccaagccagtgcagtacttatacccaatctcctacatggacctattgcagcacctacaccaccactagcgtaccatctcaatgcagcaaggccgtgactacttatactcatacctgctgtgcttatgcccaacaaacttcctatgcagtc

SEQ ID NO: 4224 - DNA, 350 bp, Cyanidium caldarium
  Clone ID: LIB190-030-Q1-E1-C10
tttaggacaaccaatttgtcgtgaatttgagctaaaaaatgtaatttacatttgatctctctctctgctctaccgctacagcagcaggcacaagacgcagactgcttaggggtcacaaggcttacagttacatccccacgaacaaataggaagcggtctgtgcccggtacgcctgacaaataagtgttacacccttgtccaactacaggcttgttcggttagctctcaatccatgtgaattgaatgagattggatgtgtttgaatcgcaaacaagttaaacttcttcttaattttttccaatctcatccaatccatatgttttagaaataaccgaacaaggatttgttgt

SEQ ID NO: 4225 - DNA, 413 bp, Cyanidium caldarium
  Clone ID: LIB190-030-Q1-E1-C2
acggtcgtatttccgggtcgaccacgcgtccgcactcattcaaatgcgtcagagtgctgcgacaaaacccaaagatacctcttccacaacttgtccgctaaaagatacactgtttactaaaagggatatttttattgtgctaatactaacttttttatcttttctcacaaggttttatagactagctgaaccacctgcagtggtatttgatgaggtccactttggtaaatttgtgacttggtactttacaggagaatactattttgatattcatccaccacttggaaagcttattctgtatattggcggcgtacttggaaaatataaaccaggttttctctttgacgctataggagcggaatatggagaaacaaagttttatgtgttacgttgtgttgcagcaatatttggaa

SEQ ID NO: 4226 - DNA, 434 bp, Cyanidium caldarium
  Clone ID: LIB190-030-Q1-E1-C5
gtaccggtccatcattcccgggtccacccacgcgtccgcagacgcgtgggctattctagattgctcgctgtggagaagaaatggaacaacgtcatgctgcaacagacaacagtgggactagttattggacacgtttagaagccttgttgaagcaatacttgccaaactcgcaagttttcaaggttttaagaacgttggaacgaaaacacatatctttggttgacaatctttctattgacgagatggaacaactcttgagagggaagcagtaaagaagtggagaaagatattaggtggagtgtcctaggtgacgtggaaggaattgttgttttgattttgtttgtgtgtattcaatgtataagcaagcaataaatagttttttcctacaaaaaaaaaaattcacatgcgtaatgtacccgtcaaaaaaattgcaa

SEQ ID NO: 4227 - DNA, 376 bp, Cyanidium caldarium
  Clone ID: LIB190-030-Q1-E1-C6
gtaccggtccgatgcattccgggctccacccacgcgtccgcacacgcgtccggcgtaattacaagttgtcacgagatatgaaaaagggacaatgtcgtttttgggaatatgctgtattttaaaacattggctagagctagtttcgaatactaaaaagtagttgtgaaaaaaaaaaaaaaaaaaagaaaaaaaaaaaaaaaaaaaaaaaaaaaaaaaaaaagaaaaaaaaaaagaaaaaaaaaaaaaaaaaaaaaaaaaaaaaaaaaaaaaaacaaaaaaaaaagacaaaaaaaaaaaaacaaaaaaacgcactacatgaaatgaaaatgaaagggggggcgcccctcaggatgtcactttttacgagtgggggaaa

SEQ ID NO: 4228 - DNA, 445 bp, Cyanidium caldarium
  Clone ID: LIB190-030-Q1-E1-D1
taaagagcggtgtggatttgcgctttctttggtcactgttttttgggcttttctctcgtgtattttgccgttttaaagctaggatattatttatgtcctgtgatgttttggtactagtctttttcgatgcttttagttgagtgaatggctctattgacacctaaggtgtcagttttgtgccattctctacatactaaactgccaacttgtgcaagtacacaaaaaatatacatatgtttatacagacccccagcttgcaggatgagttcaatgattgaaaaggaatcatgaaaagcaaaggagtagtggacatgtagagaaagcacttgaaaaagtagtcacgttcttgtacttgtctatgtgtaacaactgttttttgcttgaagaggttacaagtttgttgtactcgacaagctttccacgtgtcggacagtgcctttaagca

SEQ ID NO: 4229 - DNA, 389 bp, Cyanidium caldarium
  Clone ID: LIB190-030-Q1-E1-D10
gtaccggtcccacattcgcgggtccacccacgcgtccgatcctccaccaccaccaccaagctcaacaacagccagctcgcgaaaataatgaagagccgcagcatggcatcatcggccgcgctcttggtgctagccctcgcgctagtggcggccaccgccccacatgtagcggaggcaaagaagaggagagcggcggagagcggcgaggcggcggaggcgaagaagatccaggacgacttctgctcgacgctgtgcgagggcaagaaggggacggacctggtcgtgtgcaaggagtcctgcgcgctctcccagcagtccaacctggtgctgtacggcaggatccagtgcaatggcaagtgcaccgagcagaatggcatcacggcgccggc

SEQ ID NO: 4230 - DNA, 318 bp, Cyanidium caldarium
  Clone ID: LIB190-030-Q1-E1-D3
gatagaccttctcttggaaggactagttcttgcttattatcaaacagatatgcctggacaaattggaaaggttggttcgattcttggacaagcaaacgtgaatatatcgtttatgacgctcggaagacacttaccttcaaagatggcaatggtattgcttggtcttgataatgaaccagattcttctactattgaaaggataagagttgagctgagtcttgaaagaaaaccgatacttttagatctggatggtcaacatgactgacatttcttctgtgttgacataaaagccgttagttgtagcataaataattctac

SEQ ID NO: 4231 - DNA, 442 bp, Cyanidium caldarium
  unsure at all n locations
  Clone ID: LIB190-030-Q1-E1-D4
taccggtccggatntccgggtcgaccacgccgtcggaaaacgaactaggagttgcacgaacgtgagggactggaaagtgatgttgaaaactcctttgtgcgggcaacagaagcacaccggtgagtatgagagtaaatcgacccacacataggaccaggaacttagctgattgatatgtgtgatggagtggaaattgcgtctaggactttgatagattcagatggttcaaatgctggtattgcttttccaactggatgcgccatgaatcatgtggctgctcattagacgcccaatgctggagatgacacagtgttagattatcgagatgtgatggtacttgactttggaatacatgtcaatggccatagcatatactctggacgtaacaatgcgtttgatcccatataggacagcttattactggcagtgatggaaactacga

SEQ ID NO: 4232 - DNA, 481 bp, Cyanidium caldarium
  Clone ID: LIB190-030-Q1-E1-D5
gtaccggtcagacacttccggggtcacccacgcgtccggacttttattctttagttttgccacagatggagcctgtgctacaagaaatacaagtcgatgagcctcttttccagttatttcctggtatgactaaacaagaaattgtcaatcgagctcttatggtaagaaaagaagctatggagaaggagtcccctcatcgatgcgttgaaggtcttttcttcttgaaagaaacgttatacagaaatagctttaactccgaagcttttccaaaagataagctaccgaatcttcgtatatttgaagttggttcttgttttggagtggctcttcgtaagctggttcttgatggtgcttctcgttccaatgtctttggttgtgatgtttccgaaacttttgtgagccttggatacaaattttttgacgataagtctacctttggtgaacgtagtcgtctgttgagtgttttagcggacaattttca

SEQ ID NO: 4233 - DNA, 148 bp, Cyanidium caldarium
  Clone ID: LIB190-030-Q1-E1-D6
accggtcatgacattccggggtcacccacgtcgtccagaggcgtatgcgtcaggcattccttgttgacacccgattcgaatctacgtcactcttcaacaaccactttgcctcataatcgaccagttacaccgtcgctacacattgtca

SEQ ID NO: 4234 - DNA, 476 bp, Cyanidium caldarium
  Clone ID: LIB190-030-Q1-E1-D7
gtaccggtcagacattcccgggtccacccacgcgtccgcacacgcgtccgcccacgcgtccgatgtcattgaaccaaggcagtgaatcgagttcagcaagtgattatgacggcggtgataagtgtatagataataatggtatgcaaggaggaggagaatgtaaagaacctagtgttgcagaaaccaagtttcctcgctggaaagacactgccaagagaataagagatgtcgtcatatttcctctgatatcaggtcttatgattggtttaggaacggtggttggaagacggttaggacaggcgtggttctattcaaaggatgatgcgtatgtttccaagtgagacagtaactgtaagtaaggatatatggcagttgccctgtgaggcagcgagcgagcgagtgagtgagcgggcgcgcgcgcgtctttcttttttttcctttttggtggggaaagacacagagagagagagagagag

SEQ ID NO: 4235 - DNA, 290 bp, Cyanidium caldarium
  unsure at all n locations
  Clone ID: LIB190-030-Q1-E1-E3
acggtcgttagtcncggggcgcaccacgcgtccggagacttcttctcatcaagttctattagagcgaattctagtcattaatcaaaagataaaccaagtgcttgttcaggtagataaagatttggagacctggaatgaatatggcaaagatattgtacaagtaaaccagataatacgaagatatatgcgcaaactgaatattacacagtcttgatttttgaatataaacaggagaatattatttcctcccaaaaaaaaaaacaactaaaaaatatggaaaaatcgaaaac

SEQ ID NO: 4236 - DNA, 450 bp, Cyanidium caldarium
  unsure at all n locations
  Clone ID: LIB190-030-Q1-E1-E4
acggtcgtatttccgggtcgaccacgcgtccgcatgtggtggtggtggttggttggagtgagacacagactatggcgatggatagcttatcgttgttgtacgtcaccaactgtccatttttatcccaacacaaaagttttattaccaccaaccctctttttgcgtggtatgtaaaacaccgcatttgccccatgagacaacggaaaccagcaccacatggtcgtttgtccatcgcttcacggtttgtggaacaacaagaaccatccaataagcacctaggacaagattttgccgttcaaacagacctattgcagtccgactcgagtgagaacttgaaagggtttattaaaacgagaggttgtttgactcctgatgtgccgtttgtattttggtggtaagaaaagacacaagagagagagagagagaanaaaaaattgtgtccactgaaga

SEQ ID NO: 4237 - DNA, 467 bp, Cyanidium caldarium
  Clone ID: LIB190-030-Q1-E1-E6
gtaccggtccatcattcccgggtgcacccacgcgtccggagaatggtaatgtatggagtaataggagtaatgataatgatgacgttaagagggaagggagtaatgggagtacatgtaggaatgtcatggttagggataagtagtgtaataataatgggaataatgggaatgataaatgtggtaagtaggtcatataaaagcatggagtatatgtaaaggtctagtagtatagtaagtgtaaaagggaaaggaaaggagagaaagaggaaagggatgaaatgcagagatctctatagaaaggcaagaaagaaaagaaaggaagacacagtaaatgaggcgagaaagcataagaagtgaaacggattatgaacccgtgtagtctatgcagtaaaagaaagaatgagtaagagaaaagggagtcattccaccacgggagtaaaggcgcacgacagaaacccaaagcaatt

SEQ ID NO: 4238 - DNA, 389 bp, Cyanidium caldarium
  Clone ID: LIB190-030-Q1-E1-E7
gtacggtctatcattcccgggtccacccacgcgtccgtagaaaagccttctcgaaagctgaacagggaagcctagcggaactattgagacaacttttggccactgccactccaactgccacagagatacctctgccaactgaagctccagttccaactgaagctccaattgttacagtaagaccgattggtactgcagttcctatagggacaccacttgtgtcacgggctccacgttccacaacagtttccaggaatacgtttctttcggaacaaattgctgcctgtttccagcatctagtacattaagacttttagctaatctcaccatcttttgtagtaccaagattctaggtttgcccaagtgaccagcacatcgttgtgtggaca

SEQ ID NO: 4239 - DNA, 417 bp, Cyanidium caldarium
  Clone ID: LIB190-030-Q1-E1-E8
cacgcgtgcaggtaccggtccatgtcattccgggtccacccacgcgtcaggacattctttgtgtgcctcgtggaaatcccgatcctttgtggttatgcaagttgcaacgagcttttcatagcaacgacattcatttttgtaagttacaagtggcgtggtgaataaggaatgcagtccaataatactggtacaacattgcctaccggaatattgacggtatccgacgaattagttcgtggagagtatgaagacctgagtgggcccttgatagaccaaacccggtcaaactatttctttgagaatctcgagtacattcggagaacattagctggatgagaaaccacaaattgaagagaatcttcgacacctttgtgatgactgtcattgttgtgtggtgttcacgacaggaggaacagg

SEQ ID NO: 4240 - DNA, 385 bp, Cyanidium caldarium
  Clone ID: LIB190-030-Q1-E1-E9
ggggccacccacgcgtccggaggggttccgccgctcccgccggggcggccggtcccgccgcgacaggaagggagtcaacggcgcggccgtggagaagaccatcctgaagcgcctcccgcccacggatctggcgtctctggtcagccctctccctctccttccccgcgccagtgccggtgcctcgcccgggccgctcgtgctctacgacgactacgaggcgcggctgcgggagctgcagcggcagcgcgactggtacttgatgagcaccgcgggtgcgggtccggaggaccccgcctacttgcacttgtcggtggcggcggggcatccggataacgaggacccacagcagtggtccccgaggcgacgaccgtctccgtgccccgag

SEQ ID NO: 4241 - DNA, 365 bp, Cyanidium caldarium
  unsure at all n locations
  Clone ID: LIB190-030-Q1-E1-F11
ttcccggggtcacccacgcgtccgcacacgcgtccgcgatgaaaacccttgttcctcctggtcctcttctgcatcgtgcatggtgagaaggaagagtcaaagggcatcgatgcgaaagcgtccgggcctggtgggtccttcgacatcaccaagttgggcgcctccggcaatggcaagacagacagcacgaaggctgtgcangaggcatgggcatcggcgtgcggcggcactgggaagcagacaatcctcatacccaagggcgacttccttgtcggacaactcaacttcacaggcccttgcaagggcgacgtgaccatccaggtggatggcaatctgctggcgaccacggacctaagccagtacaa

SEQ ID NO: 4242 - DNA, 475 bp, Cyanidium caldarium
  Clone ID: LIB190-030-Q1-E1-F5
gtaccggtcagacattcccggggtcacccacgcgtccggacatatccgcggagatgttgcaaccaatcctactcctgctgcatcgttaccaagtaataatggtgcagatgatggattggcatccatttatggcgagtacaatgcaggtagccaaccaactagcgatacagtcgagtcttgggatacaggaaatgatagtccgcaaggtaatgccgatacagagtcgaatttcaaaagagagtcgcaccgacgaagaagaagaagaaatgaactgcgtaaaagtagtgaacagagcacatccacggaaaccgatccaaccgaacaaggaactatccatgcagataccaaagatttgctttcaagtcgtcaagatacagatgtgttgtggagttcttcttcatcggacaagacatcttcggcaactgctttttagtgttgacaagcagacgagtccaaaagcacaaacattcgaccg

SEQ ID NO: 4243 - DNA, 142 bp, Cyanidium caldarium
  Clone ID: LIB190-030-Q1-E1-F6
gtgtttatttcatttgctatgaagtttccgtagaccctgtcttcttgtgtcactgtccatacgattgtgttttctccgggggaattattgcttttctcaactcatgggatttcatgacacacactgagcatggtgtgcatcg

SEQ ID NO: 4244 - DNA, 376 bp, Cyanidium caldarium
  Clone ID: LIB190-030-Q1-E1-F8
taccggtccatcattcccgggtccacccacgcgtccgcaaggttctctttgagatattccttacagtcgggatagaaatagaacaactaggaacggtttatatgtatgtgtgtggttgtataaagcaaacttacttgtttcactgagaaaaaaaaaaaaaaaaaaaaaaaaaaaaaaaaaaaaaaaaaaaaaaaaaaaaaaaaaaaaaaaaaaaaaaaaaaaaaaaaaaaaaaaaaaaaaataaaaaaaaaaaaaaaaaaaaaaaaaaaaaagaccatcaatgaaaatagttcaagactgagaaatacgtgtctgaacataacaaaatccatctacaaaacaaaataaatttcaccatctggatttaataacaaaa

SEQ ID NO: 4245 - DNA, 474 bp, Cyanidium caldarium
  Clone ID: LIB190-030-Q1-E1-F9
gtaccggtcctacattcccggggccacccacgcgtccggagatggctggagcctgggcactgctcatcgtcctcgcggctgccgtcgcggtcctggccgcgcggccggcgtctgcaggcgggggagccgcggcggtggcggagatctgcatgaagactccgtcccccgacctgtgcaccaggacggcggggaagcacgccaacaagtacaaggtggtggacgcggtgacggtgctagagatgcaggtggacgcgttcaagaagcgcgtgaaggcggcgcggaggctcgccaaggaggaggtcaagacggccgcgacgcccgaggcgcggagggcgctgaacctctgcaagacctactacctggacgccgccgacaacctcggcgcctgcaagcgcgccatcggcttccgcgacgcccgtcacatccgcgccacgatgagcatggtggcgcaggacacgcagaactgcgacgagg

SEQ ID NO: 4246 - DNA, 418 bp, Cyanidium caldarium
  Clone ID: LIB190-030-Q1-E1-G3
aagcattggacaacaggcatgaaacaagcaaaaagtggtcgactggctttactagtaacagcagcaacaacaacactactcgttggttgtctcttgttgggtggttatgtaagggtagccatgggcaaccaccgtggagaagactttatcacgttgggggaaccagtgcaacgtttgagcgtgtcctcgtattctaacgggcgtcaagtatgtgccaatgcaggtccctttgataatgcgagtctggagattgaatacacgcaacttgccaataacaaggtatctgtcaagctttgttcttctgtggtgtgagaaccttcatcaccctcgtacacaacgcccttgagagagtgctctggaaaaaagaagagataaagagacttctcgttgccatcctccaaaaaaaaaagaaagaagg

SEQ ID NO: 4247 - DNA, 486 bp, Cyanidium caldarium
  unsure at all n locations
  Clone ID: LIB190-030-Q1-E1-G6
taccggtccagaattcgcgggtccacccacgcgtccgcacacgcgtccgcggacgcgtgggcaagagaagtcagcagtggggaaaattgggcaatgtacagggaagtatgacccagtaatgaggagtggagtaaacagaaaaggaagtaaaaggagggaatgaagggaagttatggcaaaaacacgtgccagcagcagcggtaaaacgtgtgtagcaagcgtagagcagaagaactgggtgtaaaggtcgagtagtagagtaagtgtaaaagggaaaggaaaggagagaaagaggaaagggatgaaatgcagagatctctagagaaaggcaagaaagaaaagaaaggaagacacagtaaatgaggcgagaaagcataggaagtgaaacggattaggaacccgtgtagtctatgcagtaaaagaaagaatgagtaaganaaaagggagtcattcccacaggggagtaaaggcgcaagaaagaaacca

SEQ ID NO: 4248 - DNA, 464 bp, Cyanidium caldarium
  unsure at all n locations
  Clone ID: LIB190-030-Q1-E1-H1
cctgccgcgtaccggtccgtatttcncggggtactaactgggagagtagaacaaggtgttgtaaaggttggagatgaagtagaaattgtaggtcttcgtaaggaacctttaaagacgacggtcattggagtggaaacatttaaaaagtcgttggatcgtggtcaagcaggagacaatgttggttgtttattgcgtggagtgaaacgggaagaggttcgtcgaggtcaaattctatgtaaaccaggttctatcaagccacataagaagtttgaagcacaaatgtacgttttgaaaaaggaagaaggaggtcgtcatactgcattcttttccaaatatcgcccgcagtttttctttcgtactgcagatgttacaggcactgtgacacttccagatggagtggagatggctatgccaggagataatcttactagtattacggagttgtttgaacctgttgccatgga

SEQ ID NO: 4249 - DNA, 307 bp, Cyanidium caldarium
  Clone ID: LIB190-030-Q1-E1-H11
ggggccacccacgcgtccggagatacccaatccgcctgaatggaaagggaagttggcctatataattaaagaaacaggggcaattgcaaggtttgggaagcacaagttagtttcaacaaccaaaacatccactatgatggttgccgtacgtggctctgtttattcacctggacagtctgcaacttctcctggccatcatgcttaccaaggggctgtaacaagctggcccttgtcgagatctgcttctttcattgcaagtccaaggtggccaggtcattcaagttatgcacaagttattgttcctcct

SEQ ID NO: 4250 - DNA, 388 bp, Cyanidium caldarium
  unsure at all n locations
  Clone ID: LIB190-030-Q1-E1-H3
accggtccgtatttcncggggccacccacgcgtccgaattgaccttcttttgcgcattgccgcctgaaagtcgaagcaagtgggcgaagcgcatgaaagaaattattgagcctggtggcgagttagtaacagtagtttttccgattggtgactacgagggtggacctccttatgcaatgagtcttgaactctacaagcagtttttagagccgctaggcttcgagagcttttatatgaagaacataagtgatcaacttccacctagttccattttcgttcgctggaaactctgtcagtagaatggaaatcatattgaagtgaaagttaatttcttctgttttggtggttgtttcgtctcattagtaaaactagagtgactccatctccc

SEQ ID NO: 4251 - DNA, 471 bp, Cyanidium caldarium
  unsure at all n locations
  Clone ID: LIB190-030-Q1-E1-H5
taccggtcagacattcccgggtccacccacgcgtccgaaacgattggagcattggctgtcgcattgaaattggcatccaccgaagaattcaaagcctatcaacaacaagtattaaagaatgcaaaacacttagcttccaagttacaagaaagaggttatcatttggttagtggtggcacagataatcatttgatgttggtagaccttcgtcctagtggaatggatggagccagagctgaaaaagtattggaaatgatttcagtggcagtaaataagaatacggttcctggtgataaaagtgcttttactcccggaggtattcgaatgggtactcatgcgatgacatctcgtggattggtggagaaagactttgatcaggtagcagaatttgtcgataagggagttgcgttggcagcaaagattaagaagaattcagggtccacactcaaagactttanagatgctctccag

SEQ ID NO: 4252 - DNA, 350 bp, Cyanidium caldarium
  Clone ID: LIB190-030-Q1-E1-H9
acgcgtccgaagtgaatcactcgttgatttgttgtagtacgaacagaaaacggaccacaaaaaactcgaggatgggaggaagatcatcatcacaaggacgtttttgttagatgtatatgttgcttagcttatttttctcgctgtgtgtaagggcttctatgccctgcccatgtacatgtttggcttcttgccccatggaatatacaaagctcatttcgctctaaaaaaaaaaaaaaaaaaaaaaaaaaaaaaaaaaaaaaaaaaaaaaaaaaaaaaaaaaaaaaaaaaagaaaacaaaaagaaaaaaaaaaaaaaaaaaacaaaaaaaaagggggggccgcccaaaaggt

SEQ ID NO: 4253 - DNA, 306 bp, Cyanidium caldarium
  unsure at all n locations
  Clone ID: LIB190-031-Q1-E1-A1
cccacgcgtccgagatgcattgctagccgttggtcgaatgagctgcgtcgaccctactactcatggaactcgtacttanaggtatgaactttttatattacctacatatatggatcgagatatctatatgtacgcttattcacatgcactccgaatggtgtatggcacctcgaaattctgccgaacgtagtcagtttggtaagaagctcttaacagtttacggtaagcgtaaaagangcgcacggggtcgctgggcattaatttctgacaatcgtacacgtggaattgcaggttttgctgcagact

SEQ ID NO: 4254 - DNA, 413 bp, Cyanidium caldarium
  Clone ID: LIB190-031-Q1-E1-A12
ccacgcgtccgcattgcaggtgtttagcttactttttatagtcttgttgtttggatacaaaaatttgtatacaagtcccagtccgaagaagagaaaagcaagcaacatagattactttatagaagctgccaatccgaggattggtcatataacaccttttattcaccagtgtttttttaacgacaacctgtcaaatgccccttctgtatattcagtcagtaaatcttcgttaactaggcataatcccaactttttgtatcacttatggacggagtcagaggcagaagaacttatcaacaggttttatcccggtcttcaacaagtatggaggaaattcaacgagtcgtttgttttacgagtagacttttttaggtatattgtgttgcacttttttggtggagtttatgctgaca

SEQ ID NO: 4255 - DNA, 352 bp, Cyanidium caldarium
  Clone ID: LIB190-031-Q1-E1-A4
cgggtccacccacgcgtccgatcatttcccctttttgtttgtttatcgtttgtcaaagtttggttgttttcttggtagcagttgtacattcaacatcatcaaatgccaaagggaggaaagaaagattcttcaaagaaagaagccacaagtaaacctgcagcagcagatgctacaaagacgacagaaaagtctggtccggaagccaagttgaagggaactggtgcaaagaaacaataaaaagttgactatgcatgtgcagtcctgttatgttttgtgagttctgtttgatagtttccagctattcttttggtagtgaataaagagaaaattttttatatttaaaattgcacag

SEQ ID NO: 4256 - DNA, 457 bp, Cyanidium caldarium
  Clone ID: LIB190-031-Q1-E1-A5
ggtccacccacgcgtccgcgcttgtggcgtgtgaagttttggttaccttgaaataatgcagatatttgtaaagacacttacaggcaagactataactcttgaagtggagccttcagatactattgagaacgtcaagtccaagatacaagacaaggaaggaattcctccagaccagcaacgtttgatatttgctggaaagcaactagaagatggtcgtactctttcagactataatattcaaaaggagtctacccttcacttggtattgcgtttgaggggtggaatgcagatatttgtgaagacacttacaggcaagactataactcttgaagtggagccttcagatactattgagaacgtcaagtccaagatacaagacaaggaaggaattcctccagaccagcaacgtttgatatttgctggaaagcaactagaagatggtcgtactccttcagac

SEQ ID NO: 4257 - DNA, 467 bp, Cyanidium caldarium
  Clone ID: LIB190-031-Q1-E1-A7
attcccgggtccacccacgcgtccgcccacgcgtccgcaaccggcctatcagttgagacgtaagacggttgccaagcactgcaacgaacacgactgttgggttattgtaaatggaaaagtgtacgacgtgacgttatttttggataaacatcctggtggaaaggagcttttgttgagctatgcaggagaggatgctacagcagctctagagggtgctggaggtcacgagcacagcaaatatgcttacaagttgcttgaggagtattatttggggaagctctcttcgagtgaagaggaaagctcgaaggtggaaagaattgggctgtttgacagcgacaaggggtctgggcaagtagttgacgtagataacctggtcgactttaagaagcctttgttgcctcaaattggaaggctcggagagctgtacgatgtctgggtacactcatttccaacaacggaccatacag

SEQ ID NO: 4258 - DNA, 441 bp, Cyanidium caldarium
  Clone ID: LIB190-031-Q1-E1-A8
taccggatcgacattcccgggtccacccacgcgtccgcacacgcgtccggttgcgaagcgttgtcgttatcgtctatggcggtatttgaaagtgatatagttggtcctgcaattcactttacgaaaaagtataattcaaggaggcgctacaaggagtgcatttcgtgctttagtgcttcgggtggtaaaccagggtggttcttttgacataagccgaaaattactcgcaacgggctatacgactgataagggtatgaagaccaataatggtgctgttcgagaaagtgacttttacgagagagtcttttcaagaatagcttcaaagcgctctgacttttggaaagaagtttctgtaaccttaataatctctaccaatgacaccgaatccgataaaggtaattcaatgtggaacgcgtttgttaccaaagaccgtcagttgtt

SEQ ID NO: 4259 - DNA, 130 bp, Cyanidium caldarium
  Clone ID: LIB190-031-Q1-E1-B12
ccacgcgtccgcacacgcgtccgcataaaaggagtcgcaaccatttaaaaagaaaaaaaaaaaaaaaaaaaaaaaaaaaaaaaaaaaaaaaaaaaaaaaaaaataaaaaaataaaataaaaatagggggg

SEQ ID NO: 4260 - DNA, 440 bp, Cyanidium caldarium
  unsure at all n locations
  Clone ID: LIB190-031-Q1-E1-B2
ccacgcgtccgcacacgcgtccgatatgaaagaagcagcaccgactgtttagcanaaacacagcactctgcagaaaagagaanatgtanagtatagagtgtgcggcctgccanatagtagagaagaaatcgatgaaagtgaaagcgagtaaaagatgaggtatanagaatggcggtcctaacggtaaggatccaaaggtagcgaagtaaatagacgtttgaaaggcgtccagtatgaaaggagaaacgagtgtagcactgtctagtcgtccaactcagcgaaacagcaataactgtgaaaatgcagtaaactagcagtaggacggaaagaccccataattcttgactagataggtttagggaggagagagaatcatgaagtagaggaggtggggtaagagatgaaagaccactgcatgaggataaggaatctaactgagt

SEQ ID NO: 4261 - DNA, 444 bp, Cyanidium caldarium
  Clone ID: LIB190-031-Q1-E1-B4
cggtccgacattcccgggtccacccacgcgtccggagaaggaagaagcagagagggactatgagcgagaaggtggatagtcgagagggaaaaagcccagaagccaagataaggtatcaaagtaaagaaagaaggaaaaggagaagaagagagggtaggcttagaagcagcaaaccagagaggaaagcgttaaagcatgaaagaaaagaaatccgaaaaagaagagaaaaaggtaagaaagaggaccgaatcagggtaagaggtagaggagcaagaagagaagagagaatgctgggtggagtagcgaaacaagagaagggaagtaaaaggtaagaaagaggaaaggtttacgagagaaggaagtagaaagaagagagtgtaaggcggcgtcataatagaaatccgaaaggagtagaagaaaagagagagaagaaagaaaagaaga

SEQ ID NO: 4262 - DNA, 389 bp, Cyanidium caldarium
  Clone ID: LIB190-031-Q1-E1-B5
cccacgcgaccgcccacgacgtcaggctagagaagagggtcgtatggcagctcttgtaggattcatcgaaggtaacgacccggaaattgtaaaaatagctgtggatgcaattctggatcttacgagccatccagataatgcggaagtattaagatcagagcgcggcctagtaccagcactaaaagccctagtcaccgactttgatacaacagaggttgcaacaaggcaatctgcgcatgcttgtttggttaacttgttggtcagaaattcagccgataacaacgcctttgtcgctgaagaattggcatcgtgggcgatcagaggtggtttaggatgaaaggatgcgtttgactcatccatctcttcttccattctaaagcccacagctc

SEQ ID NO: 4263 - DNA, 399 bp, Cyanidium caldarium
  Clone ID: LIB190-031-Q1-E1-B7
ttcgcgggtccacccacgcgtccggacgacgtccgcatgtggttccaccgcaatcacatgtgaagcgctcggtttcaaggtccctacaaaggggcttaccctagatgataataatagcaccatgtacgacaaacacggagtctgtcctctgcagtcctcaaggacgagaacgttcctgaggatcacgcccatgagttgcaagactattcgtccacagccagtgttcactgattctacaaaagtacatcggtcatcctgtaactacggtgtcatgcagggcatactctacctacaggatacgtattgcacaccctaggacaatttgataaaagttctacgtccccattggctttcgacaaacttttccccacatccgaaagtgctgctccacgaaaacaa

SEQ ID NO: 4264 - DNA, 439 bp, Cyanidium caldarium
  Clone ID: LIB190-031-Q1-E1-C1
gggtccacccacgcgtccgaggttatcttgtcgtcgacgccgattggaggccttttcttccttgcgtcatcatggtatccaaaagtagggacgtacgtcggagactaaaagaaagggcggcaaggaaagaagcccagttgaagaccatgtctgataagccatcgaagccaaagatgaagtggtacccgacggaagacaaaccgagaaagctatttttacggaaaaaaccgcaaaagcgtaccaagttgcgggcatccatcacccctgggacagtcttgatcctcttgtctggccgcttccgaggaaggagggttatctttctgaaacagctcgcaagtggactattattggtgacaggaccttttgagttgaatggcgttcctctgcgaagagtaaatcagcgttatgtcattgcaacttcaaccaaggtggatatcca

SEQ ID NO: 4265 - DNA, 459 bp, Cyanidium caldarium
  Clone ID: LIB190-031-Q1-E1-C10
ggggccacccacgcgtccggatttctgtcgtccatcgtggtagaatgagtaatcgtgttccaaaagagtggcaagaagaagtttcccaagtattgtttgataaagtaactatacaaaagagaattggtgaactagggaaacaattaagtgccgactatcaaagtcgtaaacccgttctcctcggtgtattaactggctcctttgtgttcttagctgacttgattcgggctatgacttgtgacctggagatacggtttatgagagccatttcttataaaggaacggagagcacaggaaacgttaccatcgagggattagagtttctgaatattgagtcacgtgatgttattcttgtcgaagatattgtagatactggtctcactttaaagtggatttgtgacaagttggaggagttgaaaaccaagtcactcaaaatttggacctttttggtcaaaaaga

SEQ ID NO: 4266 - DNA, 358 bp, Cyanidium caldarium
  Clone ID: LIB190-031-Q1-E1-C3
gggtccacgcacgcgtccgcacacacgtccgcaccaacttgtccgaatatacggtgcagttgatcagtcgagagtgggatattcaggaagtaactggcgtatgtaagacagtaacgggaacaggagttgttggtcagcagccgataatggagccaggtgaaacctttagatacgcttccaaatgtcctgttcgagttccttcgttctttgatccgtcgaaggacaagtttgtgggctcaatgcaaggaaaatatattttcattcgaggtgaagttggtgaagaagcatttgaagttaagattgctcggtttggtttttatttgaacttttcttgataaactgtatagtatttcatagg

SEQ ID NO: 4267 - DNA, 413 bp, Cyanidium caldarium
  Clone ID: LIB190-031-Q1-E1-C5
attcccgggtccacccacgcgtccgaaacaatcagtctgataagagcactttgaaagaagcggaggagaagctgcagagtgcagttcatactggaacagagaaagtttctcaggtgttgagcgacgtcaaggaaactgtgacggagaaatacaaggaatggacagcgccaaaaagtagccaagaagaagcaaaagaaaaagcacaagaagcgaaagaagaggctaataaagcttttaatgctatgaaagaaagtgcgagtgccgcttcagaggctgcatcagagaaagcagaaaaaattaagcaggatttgaaggagtgaagatacacagtagttttctcctatagtgtttttagtagtatctgtagtgatatttgtctcgtgatgaataaaacacggttattcgtatttcag

SEQ ID NO: 4268 - DNA, 357 bp, Cyanidium caldarium
  Clone ID: LIB190-031-Q1-E1-C7
gtaccgatccagaattcccgggtccacccacgcgtccggcaaatacggtcattccggcatacgtaccaattatcgaacgtagaaaggatatgtcatatacagaacaagagaaacgatggcagcagcttcgtagaggaagatacgtggagtttaatttggtttatgatcgaggaaccgtgtttggtctcaaaacgggcggtcgtattgaaagtattttgatgtcgttacctctaactgcacgttgggaatacgatcatcatcctgaagaaaattcaagagaagctcaactagttcaagttttgagagagcctaaagaatggatatgagggtgcaatggcaacaatgaaagtctcttgt

SEQ ID NO: 4269 - DNA, 255 bp, Cyanidium caldarium
  Clone ID: LIB190-031-Q1-E1-C9
gggtccacccacgcgaccgcacgttgtcccgtttcgtgttggatttcaactcgtacacacacacatacatatatatatgaatgaaaaatgctgcaaggaaaaaaaaaaaaaaaaagaaaaaaaaaaaaaaaaaaaaaaaaaaaaaaaaaaaaaaaaaaaaaaaaaggagaaaaaaaaaaaaaaaaaaaaacaaaaaaaaaaaaaaaaaaaaaaaaaaaaaaaaaaaaaaagaaaaaaaaaaaaaaaagtgaaaac

SEQ ID NO: 4270 - DNA, 444 bp, Cyanidium caldarium
  Clone ID: LIB190-031-Q1-E1-D1
gggtccacccacgcgtccgtggtgtgtttgttgcggttgaaagagagagagcaaaaagtattggagtgttgtaaaatgtcaagttttctaactcgagcagccttgtcattgcgtggtgcgatacaaacaacacaaaaccagtggaccaacaatggagtagcaaggagactttatcacgaaaaagtagtcgaccattatgaaaacccaaggaatttaggttcgctagataaaaacgacaaatatgtgggaacaggtctagtgggtgcccctgcctgtggagatgtcatgaagttgcaaatacgagtagatgagacagggaaaatagtagaaagtaggttcaagacatttggttgtggttcagctatagcttcatcttcttatgcaaccgagttgattcgaggaaaaaccttggaagaagcgagtaaaattaagaataaggaaatt

SEQ ID NO: 4271 - DNA, 465 bp, Cyanidium caldarium
  Clone ID: LIB190-031-Q1-E1-D10
gggtccacccacgcgtccgcacacgcgtccgcccacgcgtccgctcggcgtcgtccgtgcagtatttcattttgttacatcacctaaagaaaacaaaagagagaatatataaatgggtcgagtgagaacgaaaacagtaaaaaagtcggcccgagtgatcagcgaggaatactattccaagctgactctggactttcaaacgaacacaagaatatgcgatgaagtagcactcattccttccaaacgactgcgcaataagattgcaggtttcgtaacgcacttgatgaaacgtatccaaaaaggacctgttcgtggaatatctcttatactacatgaagaagagcgtgaaagaagaatggactttgttccagaagtttcagctatagatgtgggtgaagtcaagatcgatccagtgaccaaaaatatgttggaaccgttgggttataaaaatcctccgaatgtggt

SEQ ID NO: 4272 - DNA, 431 bp, Cyanidium caldarium
  Clone ID: LIB190-031-Q1-E1-D12
ggggccacccacgcgtccgcacacgcgtccgcccacgcgtccgcccacgcgtccgcaacgctcttccttgccatgaaatattcgaagagtcgcttatcaaagatctcgaccaacctcccaacttttatgacggcaggactatgtttcctgtctggttgcacgtttagtccaaagagagatatatcatacaaaaagtttattcacccaactccttcttcattacttgataatagcttgtgtgaacgaaaactgaaaacctgttccaacattctctatcggatacgagcccaacaacagacagaaggaaaaaaagaagaagaaagaaaccatcaactcagtgattacgagtttgcagaacgttgtatggatggtggttgccctgtggaggatgttcaagaactcttgggtcgtttagaggaccgaagaaaaac

SEQ ID NO: 4273 - DNA, 456 bp, Cyanidium caldarium
  Clone ID: LIB190-031-Q1-E1-D2
cgggtccacccacgcgtccgcacacgcgtccgcccacgcgtccggatattcctcgcaagcaacaagctttacagattgcattagctcttcgtgatgaggttgcggacttggagaaggctggttgtaccatcgttcaaatggatgaacctgcgcttcgtgaaggtttgccattgaagaaggaacgttggaatgaatatttagattgggctgtgaaagcttttcgtcttagtacggtcgttgcagcacccaagactcagattgtcacccatttatgttatagtgactttcaagatattctaaaagccatcgatgagatggatgccgacgtattaaccattgagaatagtcgtagtgatgatgccatgttgcgtgcccttgccaagtatggttattcacgtgatgtgggacctggagtctatgatgttcattcaccggctgtaccgagcatcgaatttt

SEQ ID NO: 4274 - DNA, 186 bp, Cyanidium caldarium
  Clone ID: LIB190-031-Q1-E1-D7
ttcccgcgtccacccacgcgtccgcccgcgtctagtatgaaacgaaagtcgaattcacaactgtcaagtcatcaattgcacccatccatcaacacctgcgaacatgcagtccaccatccgtacgacggaaagattcgaggattcttgactagatacgtttacataggagggacgtgtagcattcac

SEQ ID NO: 4275 - DNA, 446 bp, Cyanidium caldarium
  Clone ID: LIB190-031-Q1-E1-D8
ttcccgggtcgacccacgcgtacgcccacgcgtccggtatttggctgtgattgttgtcgttgtttggagaccatggttagcgccaccctcagtagtatgtctagagccagcttatggctcacaaggttctttttgtacacagtcattctcggtaagttggtactttggtggtggttgttgttgtggggtggctcagtcgtttttcaaagccttttctatcgccatagatggagtgatgggaaaaaagggcgacaatgtttggaatacaacccttttatacaatgggaaagtcttcgacttttgcgcatatagtgccactacgatgattgttacaagcagtaactttatcggaaactcacacacttgcatgtatgtcatcgccttagcgtcgacgagcttcatcgtctattttatcctgtgggtgcttaccattgtggacgtctttt

SEQ ID NO: 4276 - DNA, 349 bp, Cyanidium caldarium
  Clone ID: LIB190-031-Q1-E1-D9
ttccggggccacccacgcgtccggacggggataccggcaagttttgagcatgccattaaacagtagattcgtatgtagttgtcactctgctcgtagcggaaaactaaacaggtggaaccaaatgcaaaagcccgcaggtactactaagatcgtacgataatcacgcaggggtggcaaaagtggactatgggaagagaagcaccagtttcctgtaatcgtcaatcacacttgctaagtgaccaggcaaacgctcccccacatgatcacaccttgtaactataggtctcgaaggaatctccaggttgcaaggtagtagaacctaaaactggtatttttttgggagcatcca

SEQ ID NO: 4277 - DNA, 396 bp, Cyanidium caldarium
  Clone ID: LIB190-031-Q1-E1-E1
acgcgtccgaagaaatgttgccatcgttgttgaacgccagagctcgagcatcagaggcgtcgtactttcgaaaaggagagcagttaggaacccacgagttgaggaaaagtataagtaaggaagaagtggaaaaacttcgacaagaaaacagatctttggaggaaaaaataaggagtggagagtttcaaggtctgcctgagatcctacagaatgtctggataccatcatggaaaccggaaaacaatgttcataccattgaaagaccgcttcaggttcctttgaagagagaaaacaggttttcggtaaagaaagaacaagctttgcccaccagtgagctttccagttctgcaaggtttgcagcacacccacatcatgacttgaccagagggagatacg

SEQ ID NO: 4278 - DNA, 407 bp, Cyanidium caldarium
  Clone ID: LIB190-031-Q1-E1-E12
gggtccacccacgcgtccgcacacgcgtccgagcgcctctttgaattattggaatgagccttttgtgattctggacgcttcttatccaccaagtacggtggccaatatattgcctccagaacaactttgtccatttgcagttccagtacataacaacaacgatggaacgacaaagaaaaatccggttgctttaccgaaagaatatttagaagctgtggatgaaaaggcaaagtctgtagacacactacgagaattggtgaggcaacaacaaggaaacttggacttggaacgaactgtacagcattattttcgagaatggctcatatctacaggaaatataagacaaattcatgacctcgtcaagttggcagagtcttttgaataaaagtggtgattttatgtaaaaa

SEQ ID NO: 4279 - DNA, 220 bp, Cyanidium caldarium
  Clone ID: LIB190-031-Q1-E1-E2
ccgggtccacccacgcgtccgaatcggggtagaatgattcggctgcacatggattatccttgtcttttaatactgtttcgagttccgtcatttgctcttgtatgagtttctcataacataaactctgttgctgcgactggttggatgacgactcggcttcttctggggggcaataccagtcaaagtgctccttactcgattccgcatgaaaaactgagga

SEQ ID NO: 4280 - DNA, 397 bp, Cyanidium caldarium
  Clone ID: LIB190-031-Q1-E1-E3
gcgtccgcacacacgtccgctacaaatcgagaattggctcaaggtcgcaaagaaaacccatattacttggttatatttcagaatggacagctgctttcctacagtcgttccttgggaagcaggagagaatccgtttatctgtcattgttatggctctcattatgacagtagagccacgtagtccgaggtccagctctctgcttcccttggctctgtggatgggaggaaacattgttttcaagactttaaaggaaaagatttccgcaaagagtctgacccgtggtggacataagtgtggatacttagaataggatttcgtttgctaagtagcataaagttttagtttgccaaagtgtaacttacagggtttaaagttttcaatccttttgaagctcga

SEQ ID NO: 4281 - DNA, 472 bp, Cyanidium caldarium
  Clone ID: LIB190-031-Q1-E1-E6
gtaccggatcgagaattcgcgggtcgacccacgcgaccgacgaagaagatggtgaatttcaagtttgggatatcgaacagaggaaacctattagtacagttcctctttcatcttcacgtgatgcagtcactttggcatattatccagaaagaaatgtatattttgtgggaagtcatgttcgcttgtatatgttggatcctcgagttggaagacttcaaaattccgtatattttctcaataatttacacgcttcacatatacgcagccttgtagttcgttatcacatgttgactattggatttggaacaggaaggctttttttctatgatttacgcaaaggtaatgagactcttgttcgaaacggtcatcgaggacttcgacttggtcgtggttgggttcgtcaagagaatcaaacggatagtcccggtcctcacctcattgaagactacaatcctgctgtatattgcatgag

SEQ ID NO: 4282 - DNA, 411 bp, Cyanidium caldarium
  Clone ID: LIB190-031-Q1-E1-E8
cccacgcgtacgcacacgcgtccgggagacccaaattaaggtgagagaatggacgataaggaactaggcaaaaggatatggtatctgcggtagaacatatgacagaagcagcaccgactgtttagcaaaaacacagcactctgcagaaaagagagggtgtacagtatagagtgtgcggcctgccaaatagtagagaagaaatcgatgaaagtgaaagcgagtaaaagatgaggtatagagaatggcggtcctaacggtaaggatccaaaggtagcgaagtaaatagacgtttgaaaggcgtccagtatgacaggagaattgagtgtatcactgtctagtcgtacaactcagcgaaacagcactagctgtgaaaatgcagtaaactagcactaggacggaacgaccccatac

SEQ ID NO: 4283 - DNA, 422 bp, Cyanidium caldarium
  Clone ID: LIB190-031-Q1-E1-E9
ggggccacccacgcgtccgcacacgcgtccgggcttcattcgggaagataagaaaccaaactttgcacttcctatcggagtttccatcttttcattggttttcgctggtttgctagctgtcctggaactagcacgagtagtatttgttttcgaatccgtacttggaccactaaaaatggaactgagtttggtctctttgggagcagcagcagccccattcgttgttttggaactatcggtaactgttcttttagactctcgcaaacttcgaacgctatccatagttgtataggaagacgccaacgaagaggctaatttgctactgcgatctgtataacttgtggatggaaccggtggaggagctttgcttcttgtagaacgaatagaagatttgtcttcatcgttgctgttgttgttgtttt

SEQ ID NO: 4284 - DNA, 455 bp, Cyanidium caldarium
  Clone ID: LIB190-031-Q1-E1-F1
gggtccacccacgcgtccgcatagtggcaactccgctgtcttgaaagacataactgcaagtattgaaaagcctgacataaaatggataactaggacgaatctcagtacttgtctgaattctgcagaaggaaatgttacggttgacttgtcgcggcagtgtagcttgaaggatatattttcattgaagcttctcgacaataactttaagttggcgtgttttaatgatgccttgtttttagttttaccaggcttatcctttgttattactggtaatcgtatattctgtagacgctcggacttgaatgaaacggaagcattggagtcctgcttttcgtttatgaagatatgccccacgtacaagtcgttggagattcttttggaaggcgagcaaatttatgtagaagaactcgtgcctattgtatttcgtttcgttgaagactttcttcattttcttt

SEQ ID NO: 4285 - DNA, 420 bp, Cyanidium caldarium
  Clone ID: LIB190-031-Q1-E1-F12
gggtccacccacgcgtccgcaaacgcgtccgcgccaaatgtctgctgcaacttgtccaaagaaaagatatcaaaaggagaaagtcttgggagaaggaacttttggaatcgttaacaaagcaaaggatacaaagacaggtcaatatgttgctatcaaaaaagttcgaatgggaaattccaaggatggtgttgcgatacctgctctacgtgagataaaaatattgcaagatgttcgacacgagaaccttattaacttgttggatgtttttgggacaagcagtaatatcaacttggtattcgattattgtatcgcagacttggaacaaattatcaaggacaaaacgattgcactaagtacagcagaagtgaaaggagccttgaaaatgatactttgtggagttgcaaaacttcacgagcattg

SEQ ID NO: 4286 - DNA, 453 bp, Cyanidium caldarium
  Clone ID: LIB190-031-Q1-E1-F2
gggtccacccacgcgtccgcccgatggtaccgtgctcccgaaatcatcttgactaattatacccgatattccacatctataaatgtatggtcggctgggttgtattcttggtgaaatgctgaacagaggcgttcctttgtttagaggaaccaattcacccaatcaattggaagttattgtcaagttacttggaaaacctggacccgaagcaatatcgcaagtatgtgtaaaagagtatgtttcttatcggattcttatttcagcaacagattcgtagcgatcgagcgagagcacttctcatgcagatgcctgctaggacgataccaaaattggaagaagtttttcccagagctcatcctgaagccctttccttgctaaagagactcttggagtttgatccgcggaagagaccttctgctgcacaagtattagatgatccttactttgccaagt

SEQ ID NO: 4287 - DNA, 364 bp, Cyanidium caldarium
  Clone ID: LIB190-031-Q1-E1-F3
cgggtccacgcacgcgtccgcatgcattgatgagacctggtagatttggttcaaaaataaaaattgggttggcaaaattaaaaaggaaaaacgcaaatctttcgaattcatgcaaaaagtatgaattgtgaacgcggaattcgctttgaactattggctcgtttatgtcccaacacaacaggtgcagacatacgaagtgtttgtacagaagctggtatgtttgctataagagcgagaagaaaaacagtgacagaaaaggactttttacaagctattgacaaagtagtcaaaggatatgccaagttttcttatgttagcaaatatatgatattcaattaaaacggtattcgttatattcgaaaaa

SEQ ID NO: 4288 - DNA, 335 bp, Cyanidium caldarium
  Clone ID: LIB190-031-Q1-E1-F4
cgggtcacccacgcgtccgcacacgcgtccgcctgaatgctattttaccactttatcttaacggccaaattttaagaactcttcaagaatccgtagcatcagagttggccagtcgaatgagtgccatgtctgcagcttcagacaatgcaaaggagttggcgaaagcactaactcttgttttgaatcgagctcgtcaagctgcaattacgcaggaaattgctgaaatagtgggagctgcgtcggcactgcagtgaagtttcgttctcaattgttggggaatactttgggatagcgtggaactttatataaacatagagttatctgcaatatatagc

SEQ ID NO: 4289 - DNA, 471 bp, Cyanidium caldarium
  Clone ID: LIB190-031-Q1-E1-F6
gtaccgatccagaattcgcgggtcgacccacgcgaccgcacacgcgtccgggagaaacgagtgtagcactgtctagtcgtccaactcagcgaaacagcaataactgtgaaaatgcagtaaactagcagtaggacggaaagaccccataattcttgactagataggtttagggaggagagagaatcatgaagtagaggaggtggggtaagagatgaaagaccactgcatgaggataaggaatctaactgagtaaggaaaataagcttaagctagtttggctggggaagtaaagcctaagaaagagtaaattaggcaagcaaaggcatgagagaagtataatagcagaagcatgcttgaagaaaaagaaagagatttcagaaagggaagaaaagtcagctatagagaacaggtgaaggagaactcaaaaagaggagagcaccgaacgatcgaagaagaaactttggggggtac

SEQ ID NO: 4290 - DNA, 205 bp, Cyanidium caldarium
  Clone ID: LIB190-031-Q1-E1-F8
aattcgcgggtcgacccacgcgaccgatgctttgaaacgccagggtcgtacgttgtacggttttggtggttaagaggcaaacaaaaacatggtgtttttcaacaccaccagttgtgaaagaaacttgggtttcagtctcagtagacccttccttgtttatgaaattagagctttgcaaatataaaacactttctttttacgttgt

SEQ ID NO: 4291 - DNA, 434 bp, Cyanidium caldarium
  Clone ID: LIB190-031-Q1-E1-G10
gggtccacccacgcgtccggaatatttttggcaatatcaaccgaagacttgtcattcactcggcattcaaatgcctgagagatatgcgaatatcggagcagacttctttccagattggtatatactaaccaagtgcgacgttttggctattagtaactctacgtttagttttaccagttgtttgttgaatcagcgaaaaaaccccaagttttatagagctcattacctttatcgcattattgaaatagatccttggaatacagacccaattgtgcacaaggaggttcccctttcctttgggaagaggatatggaatgatatattgttgttgtatcgacaacaaggaataagaggacttttgagaaatatattttggggatttcctttgtatagaattcgttcacttttgattggaatgggcctgggttttcgaa

SEQ ID NO: 4292 - DNA, 377 bp, Cyanidium caldarium
  Clone ID: LIB190-031-Q1-E1-G3
gggtccacccacgcgtccgcagacacgtggggaggaattggttggtctctgtcgatggcgtggaactgtttccgagaaaccggtaaaaactgttttccacaacttgtaagggaccggaaagtttgggccattcaaccaaattgggatcccgttccaaggttgtaaaggtcaaaccaaaggaaaccaaagggacaccatttcaaggacccaattatacccaagggaaaaaatttgtggtaccacaaattcgggtgcaacaaacaggaacaaggtttctccccggttatggtattggtgtggccagggattttaccctcaatgctttgcaccctggtacacttatttttgaaaaaatccgcaataaaaatgggaaaaag

SEQ ID NO: 4293 - DNA, 441 bp, Cyanidium caldarium
  unsure at all n locations
  Clone ID: LIB190-031-Q1-E1-G8
attcgcgggtccacccacgcgtccgaaccagaaagaaagtctgccaataataaaaagaagactacatctgcttcagaaggtcaatcagagcttcaatatagacgtcgcattgtgtcttatggtgaagatggaagtgttttatttgaaagggatctgcaaccaggcgaagattttagtgttgcgctggaggaatggaatgaagaaagaagcaatttgggtgatactgttgtagaagcaatgaatcctgaactagattgggtacaaaatgatgttgaagaagagaaagtctctgtgtctanaagaattcccaagtggattgcagacgatgtcgatttggatgaaagttaagaagaagaggaagaggacgagacgaccacagatgagatgttttccgaaggaagaagaaagttgtaaaaagctgaaaacctgcactagtttttt

SEQ ID NO: 4294 - DNA, 382 bp, Cyanidium caldarium
  Clone ID: LIB190-031-Q1-E1-G9
ggggccacccacgcgtccgcacaagcgtccgcccacgcgtccgaaaggtagcgaagtacatagacgttctgaaaggcgtccagtaggaaaggagaaacgagtgtagcactgtcgagtcgtccaactcagcgaaagagcaataagtgtgaaaatgcagtaaactagcggtaggacggaaagaccccataagtcgtgactagagaggtttagggaggagagagaatcatgatgtagaggaggtggggtaagagatgaaagaccactgcatgaggataaggaatctaactgagtaaggaacataggcttatgctaatttggccggggaagtatagcctacgaaagagtaaattaggccagccaaggcatgacaaaaatatcgcag

SEQ ID NO: 4295 - DNA, 398 bp, Cyanidium caldarium
  Clone ID: LIB190-031-Q1-E1-H11
ttcgcgggtccacccacgcgtccggacgtggactttatggggaagaagttactaagattgagcaatgaataaagacttgatttggcaacgtccaagtttctggttcaaggttgcaggttttagtggagcagctgctgtaggtttgggagcctttggtgctcatggactccgggcacgagtcacagacccttatttgttagaaatatggaatcgtgcggcaagttatcaccagatacatagtttagctgtttgtgctgcagcctgttgtgcaaataccgagggaaaacctgcttttgtagcagcgtcgttgttctctcttggaatagcgttgttctctggttccctgtatgctttgactttaactggaaaccgaaaacttggtgcaattaccccgtttg

SEQ ID NO: 4296 - DNA, 460 bp, Cyanidium caldarium
  Clone ID: LIB190-031-Q1-E1-H3
gggtccagccacgcgtccgaatcaatgtaagatgttgagaccgcagtacgaaaaagttgcaaagacttatcgccatgtgaaaggagtggtgattgcagctatcgatgccgataaatatggaaagattgcagaaaagtatcgaatcactgggtttcctacattgaaatattttccagctgggaaagataagaaaccgatggaatacgactcgagtcggatggcagtagctatggtggactttatgaatcgtcaagttgggttggatatcgaattgggaggagacgagttggtacaagatgctggaagagtggaagtgatggatacttttgcacgcgactttatgcagtcgaggaatgaaagccaacgcgagtcgattcgtcaagctgcgaccgaagcattgtcctcggatgcttcgttgaaaggtcaagtactacaaaatgccaagttttatgtgacggtg

SEQ ID NO: 4297 - DNA, 462 bp, Cyanidium caldarium
  Clone ID: LIB190-031-Q1-E1-H5
attcccgggtccacccacgcgtccgcacacgcgtccgcccacgcgtccgggcaatcattgactttgcaagtggaaagatataacactgataagagaaagatggaagttgatgaaccgcactttgaatgaaaggatacgtttgtcacacttgctatgttagtactgggtgaagtgtgcatcttcgagacttttctaaaagtggttgagagtgattttgctaaacagtggatatcgtcatggaaagatgtcacgaagtaagctgttgagttgttgtactttggaggtttcccgttgatgacaactgtatcagttgagtcatttttattgtgttgaagctccgtttcttggagaactgatatttatgaattaagtatatatttaccgtgctaaggtaattggtaaatgcttggtttcatgatagagagatacagcataaacagcttacatagttaatttgcttcg

SEQ ID NO: 4298 - DNA, 447 bp, Cyanidium caldarium
  Clone ID: LIB190-031-Q1-E1-H6
gggtccacccacgcgtccgcatgaatagagagcaaacaatatctgagaagcagcaacagcagtcgaagaattttcgtttgggaattgtgactccaaatatggcaagtggaaccgctgatgtaggtctgataggcttagctgtgatgggacaaaacttggtactgaatatgaacgaccatggatttaaagtagcggtttttaacagaactgtctcaaaagtagacgactttcttaacggagaagccaagaataccaacatagtgggggcgcactcgttgcaagagttttgtggtcttttgaagaaacccagaatcattattcttcttgtcaaggcgggtgaagcagtagatcagtttatttctatgctcgtgccacttttgtctagtggtgatctcatagttgatgggggaaactcccactttcctggacacagacgatgaacgaaag

SEQ ID NO: 4299 - DNA, 464 bp, Cyanidium caldarium
  Clone ID: LIB190-031-Q1-E1-H7
attcccgggtccacccacgcgtccggaataatatagccggaaggagatcatcttactctactagcggtatatgaagcttggaaagccaacaattattctactgcttggtgttttgaaaactttattcaagcacgttctttaaaaagagctcaagacattcgcaaacaattagtagctattatggaacgacaacgattaagtttggtctcggcaggaagagcctacaataagattcgtaaagctatcgtttccggtttctttatgcacgcagcaaagaaagatcctcaagaaggttatcgaacgatagcagaaggacaacctgtttatattcatccttcttcctcgttatttcatattcaacctgattgggttatttatcatgaattggtacaaaccacgaaagagtaggtagatgttcttgtgcttagcattctttatgactcaaatatctattctctagatat

SEQ ID NO: 4300 - DNA, 379 bp, Cyanidium caldarium
  Clone ID: LIB190-031-Q1-E1-H8
gggtccacccacgcgtccgaacgcaaattgttttcagaacagcaagagaagaagaaacttgtgaatagaatagaagaattggaacattatttggaaagaatcaacaacaataaggaaagcagcaataccttgtcgtcatcaccacaagaaaaacaagataattctttcccaagtgacattgttcgagaacaagaacaacaaattagtgtattatctcaacagttggcacaacgtgataatactattcatcagttgcaatctcagttatccaatgctttacaagaacgagaacaacatgagcaacaacagcagtcatcttgtttgtatgaacataacatgaaagaatatgaagagaatattcagtcattgcagtgtcaat

SEQ ID NO: 4301 - DNA, 291 bp, Cyanidium caldarium
  Clone ID: LIB190-032-Q1-E1-A6
cgggacgaccacgcgtcgggtaaaaagtgcaagtgtgggatttcagtgcaggtatcgacaatgcaagcgttttggcccaactaatgaccaaaaaagatgacaagaagcagaaataaaaaccgcatttactcttcttttagctttaagaaaaagaggaatgagaactggtgagtacgttggaaagtgcgcggaaaaggggggcggccgcacaggaggatagatgattacgtacgggtgaaggcgacgtaagagttcgaaaatggtgtcaggaaaaattcaagtcaggggtcg

SEQ ID NO: 4302 - DNA, 181 bp, Cyanidium caldarium
  Clone ID: LIB190-032-Q1-E1-A8
ggaattccgggacgaccacgcgtcgggccacgcgtcaggatgtcattggagaggatatgcatgcatgtgttttcgtaagtggagcagcgatgcttcaaacagtcgcaaataggactgagctaaagtcaatgaaaagctccttgagactttgtagtggtgtgtttgttcccaaacagagtaa

SEQ ID NO: 4303 - DNA, 326 bp, Cyanidium caldarium
  Clone ID: LIB190-032-Q1-E1-E2
ccacacgtcggacagaaacaactggaattaccctagtagcggcgagcgaagcgggaagagcccactatgagaatcctctttttcttttgagaaaagaagagatgtatttgaaaaaagacaagaaatatctgcagcaagaaaagagcaaatttcctggaatggaatatcatggagggtgagaatcccgtttatctcttttctttgtatggaagctgcgttacgatatttcctgttgtggagtcgggttgtttggtagtacagccttaattttgtgggtgttataaatcatccaaggctaaatacgtaaagagagaccgatagcgaac

SEQ ID NO: 4304 - DNA, 378 bp, Cyanidium caldarium
  Clone ID: LIB190-032-Q1-E1-G5
accacgcgtcgcggcaaagtatagagtgtgcggcctgccaaatagtagagaagaaatcgatgaaagtgaaagcgagtaaaagatgaggtatagagaatggcggtcctaactgtaaggatccaaaggtagcgaagtaaatagacgtttgaaaggcgtccagtatgaaaggagaaacgagtgtagcactgtctagtcgtccaactcagcgaaacagcaataactgtgaaaatgcagtaaactagcagtaggacggaaagaccccataattcttgactagataggtttagggaggagagagaatcatgaagtagaggaagtggggtaagagatgaaagaccactgcatgaggataacgaatctaactgagtaaggaaaata

SEQ ID NO: 4305 - DNA, 450 bp, Cyanidium caldarium
  Clone ID: LIB190-032-Q1-E1-H7
ggaattccgggacgaccacgcgtccgcaatgagcagattgagcatctcactcgagaattggagttatcttcatcaagggtagctatattgaaaaacaagttaaagttggtacagcgaagttgggaagtagatttcagtgagattaacaaattagaaaagattggatccggtgcctattcagaactatttaaagcagaatggagagggcacattgtagctgtaaagttgatgaaagctcaagaaactcggaagaatcctgcgtcatttcatgacaagtgaaacacttcaagtgaacatcgatatgtttattatggcgctgtgaggcacaattccatatacgatttgttggagatgtaaagctgaaagccttgaaatgccacaattgaactgagaacacaagactgttgcacaaatacaccagtaacaactctcaaacatgacgtacgcaaa

SEQ ID NO: 4306 - DNA, 378 bp, Cyanidium caldarium
  Clone ID: LIB190-033-Q1-E1-A10
gatggctgtttgcaattcgcttgtggcgtgtgaagttttggttaccttgaaataatgcagatatttgtaaagacacttacaggcaagactataactcttgaagtggagccttcagatactattgagaacgtcaagtccaagatacaagacaaggaaggaattcctccagaccagcaacgtttgatatttgctggaaagcaactagaagatggtcgtactctttcagactataatattcaaaaggagtctacccttcacttggtattgcgtttgaggggtggaatgcagatatttgtgaagacacttacaggcaagactataactcttgaagtggagccttcagatactattgagaacgtcaagtccaagatacaagac

SEQ ID NO: 4307 - DNA, 388 bp, Cyanidium caldarium
  Clone ID: LIB190-033-Q1-E1-A6
ggatatccggatcgaccacgcgtccgatcatattcaatactgacatggtggaaactttagagttggaaaacttgttgcaaaatgctttgattaccatatatggagcagaagcacgtcatgaaagtagaggtgcgcattctagagaagactatcctaagagggacgatgagaactggatgaagcacactctcggttggatttcctctcctaagaagccttttgtttcaggagaccgaaaagcatatgtaaaactggattatcgtccagtgatatcggaaacgttagatagcacagagcaagaatcttttcctcctgctcaaagagtttattagatattatcatgtagaaagccgtattcttttgcaaataaaccgaagagtgcatgaaa

SEQ ID NO: 4308 - DNA, 315 bp, Cyanidium caldarium
  Clone ID: LIB190-033-Q1-E1-C10
gggtcgacgcacgcgtccggacattaaatcttcaggtcctcatttcttggttgaacatgtgaaacgcactttaggaatggattttgcatatggaaatactttcgaaaccgatgcaatgggcaatttcactggggaaataagtcagcctattgtgaatgccagtagaaaggcagatttactgcaaatgttaacgatgcaagaaagaataagtttggaacaagtaattgcagtaggtgatggacccgtatctttagaaatgttgtctcttgcaggaatggcaatatctgtcgatcaggtatggtattgtactcgttg

SEQ ID NO: 4309 - DNA, 207 bp, Cyanidium caldarium
  Clone ID: LIB190-033-Q1-E1-C11
ggtccgagtttacgggtccacgacgcgtccgcacacgagtccgcccacgcgtccgaaaaaaaaaaaaaaaaaaaaaaaaaaaaaaaaaaaaaaaaaaaaaaaaaaaaaaaaaaaaaaaaaaaagggcggacgcacaaaaggataaaagggtggggtactcttgcatgcaacgtcatacctcggggggggtgtcatttaaattcaatt

SEQ ID NO: 4310 - DNA, 402 bp, Cyanidium caldarium
  Clone ID: LIB190-033-Q1-E1-C9
ggtcgacgcacgcgtccgggtggccaaaaccaccaaacatggcgagttggattcgaagtggttttcgtgtcacgaaacacattaccaacaagacaaatagaatattccaacgaggaaaaacggcgcgttccaaatcgacgaccactggtgatcgaacctggttagccatccaagactatagccatcaaaggtttgcttgtcggaatattgcaaagagaagtccaagtatctccgacactatttccaagaataattgtgtggtgagggactctggtcgtgcttctcttgcaactgctgctgcggactcttccaccaaaggacttgcttgtctcgaggccgtagaaggaaaagctgcatcgttggcaaagtctttggccgtgttgggtaaaaatagtgatgttg

SEQ ID NO: 4311 - DNA, 482 bp, Cyanidium caldarium
  Clone ID: LIB190-033-Q1-E1-E11
cgggcccggtcgagattaccgggtcgacgcacgcgtccgcatcttagggttttattggatactctacatgtctcaatcagttcgtctattcattggaaacttgtcgtggaagactactagcgaaagtctgaaacgagcatttcaaaatgccgtcggtgcagaatcaagtgttgtaaacgcacacgttgtcatggatagatattccggacgttcaaagggttttggatttgtgacctttacttcaccagaagaggctgcctcggcagtgaatctgcttaatggaaaggaagtcgatggcagagcaataagggtggacttggcacacgaacgtgaagaaggagcttcgcgccaattcagaaggaacgaagtggaagatgagtagcttttaggataccactgtctgttgatagaacagacactgctcggatgcgttatttgtagccagtccttacagaataaagaccacaagtgcgattcccgtt

SEQ ID NO: 4312 - DNA, 427 bp, Cyanidium caldarium
  unsure at all n locations
  Clone ID: LIB190-033-Q1-E1-E12
gggtcgacgcacgcgtccgggaggaattcgcgtggcagtcattgactgtcagcctttacctgaaatagtgcagcaagtaaccaacgaaaaaaattttacaggatgttttcaggcactctttgataaactggtggaagaaagaggcggtccacaactccaaatggtatctttcaacgctcaacaaggacagcttccagcgcccgacgaaaacttccacgcttatctagtaactggctcgttctcttccgcttacgagaaacgaccctggattgagaaacttggacagtttttaaagcatacatacacaacaacccaagttcctttgatcggaatttgttttggacatcagatgttggcacaggcactangaggactttcggaactttgtaaaaagggtccagaggttggtttgagtacatttacacca

SEQ ID NO: 4313 - DNA, 439 bp, Cyanidium caldarium
  Clone ID: LIB190-033-Q1-E1-F12
gggtcgacgcacgcgtccgaaataatcgtcgattccgagtagcgatggcgaaaagtgaaccgggggtgatatacataggtcacttaccgcatggtttttacgaaaaccaactaaaggggtttttctctcagtttggaaccgtgctgaaagttcgagtggcaagaagcataaaaacttatcgaccaaagggttatgcttttgtgatgttcgcgaaccgagaagttgccgaaattgcttgtagagctatggacggttatttcatgtataacaaaattttggtctgtaaaatggtaccaccagagaaagttcgcccgaatatgtttagaaagttcgtgaagattccctggaagaagctagaaaagaaccgccgtgctttgccgctcaccgaagaccggttgaagagactcaagaggaaacaacataaaagaaacaaagagct

SEQ ID NO: 4314 - DNA, 441 bp, Cyanidium caldarium
  Clone ID: LIB190-033-Q1-E1-F9
gggtcgacgcacgcgtccgcccacgagtccgagagatgctaaaaagtacgcttctcctgaaagaacaagaactgattgccgatataaaaggaagaacggaccgagttttacaagtcgatattgctggagtattcttctctgccgttttttcaggagttttgatgattcctgccttttttgcgttcaatatgttaattccaatagagcatttgaggaacggaagtacttattttttcattgcggtagtaattctttgtttcgtagctattgctgttctggccattctgtatgtaaggtggcttaaaggaaatgaaagaatgcgacttgagttgctgttgggcaaggagaagacagcaacaataacaggaacagtgaatagttagaaacgttgatattcgtagatattcactacttttaaaaggatctttttctgcgttctcc

SEQ ID NO: 4315 - DNA, 433 bp, Cyanidium caldarium
  unsure at all n locations
  Clone ID: LIB190-033-Q1-E1-G11
ggtccgagnattaccggggcgacgcacgcgtccgcacacgcgtccgcccacgcgtccggtcccaaatctcttcatgtttttgtgccgtgcaagagcagcaaacgctgcacgcatacaagcacttgtttgagagctcaaataaggcttcctcaagtcagtgaagtacagcacgccagtttcgatgagtgtatacctctggctagaaatatatgttttcgcctgcaagaggagcctcaagatgacgaagcttatgaagttttaagggaaatgttatcacgagaagaaggcgccagagcttttttcgttgaatatctttctgactttgagttacgcttagcagataaaaaaccaccatttaagctagagaagcttctgaaggattgtgatgagcatgtacctaatctccttgctagaaatcttgcaatgtcagttg

SEQ ID NO: 4316 - DNA, 203 bp, Cyanidium caldarium
  Clone ID: LIB190-033-Q1-E1-G12
ggtcgacgcacgcgtccgccacacgcatccggcaaaacggagtgacaaagttggaagaaaatgcctcgagcacgtaaagttgtgtctcgctcggttttaagaaggtaaccaaaccagagaaaacccaccccttataaggatgggccaactcaaacctccaataacgccaaaagttccaccaatgccaaaccacatagatatcc

SEQ ID NO: 4317 - DNA, 379 bp, Cyanidium caldarium
  Clone ID: LIB190-033-Q1-E1-G5
accacgcgtccgactcaaaggaaaaggatacgagtcaactgaaagcggagaaatattatatatcggaaggtgtctttggagcatttcatgagttacttaccgagactgtgaatgatttatgtccgtatccgcttattgaaaacaaggaaaaaggtccagtttctttttgttctatttatggtccaagcggcgactgtttggatcatatttggtctggagtgttgccagttttgaatattcacgactatattttctttccaaagattggaagctttctatccttgggtttacgcgaatttaatgacttttcacgcaaagtagatactcgttatatcgttactttgtgaataaaaaacaacgagttgttttattcaacaaa

SEQ ID NO: 4318 - DNA, 428 bp, Cyanidium caldarium
  Clone ID: LIB190-033-Q1-E1-H10
gggccacgcacgcgtccgcacacgcatccgcccacgcgtccgcccacgcgtccgcccacgcgtccgctcgaagacggacatcctgtctgcatactttggtaattgcttttacaagtaactgcaacaaaaaatttcgtataatggagcctcctttttggttattaaagtcgcttaacaatcaggcaaatgctatagtgcttccaacgaaaagataggattgcaactcttcaattacaacctagaatagcttatttgaaatgagaattcaagatggtttacgccaagcaggtcggaacgccccaacaaacaaagatagcttgttgagaaccaaaaggtcgaggcgaactctcgtctgctttgagaaagcattctgaaaaaatgggttactaggcacaaaacaaaagtaaatcctaattttattcattcac

SEQ ID NO: 4319 - DNA, 311 bp, Cyanidium caldarium
  Clone ID: LIB190-033-Q1-E1-H11
cgcgtccgccaacgcatccgcccacgcgtccgcccacgcgtccgacaagtgtcgtcagtaaatgtctctgtcttttccttttgaaaaaaaaaaaaaaaaaaaaaaaaaaaaaaaaaaaaaaaaaaaaaaaaaaaaaaaaaaaaaaaaaaaaaaaaaaaaaaaaaaaaaaaaaaagaaaaaaaaaaaaaaaaaaaaaaaaaaaaaaaaaagaaaaaaaaaaaaaaaaaaaaaaaaaaaaaagaaaaaaaaataaaaataaaaaacagaacgaaaaaaaaaaaaaaataaaggaaaaaaccatgagaagacag

SEQ ID NO: 4320 - DNA, 366 bp, Cyanidium caldarium
  Clone ID: LIB190-033-Q1-E1-H5
ccacgcgtccggcgtgatactaggatgggaggtttcggctactttttaaagtcaactttgttttctggcagacacccggagattattccattggtttccgctattgctctgtgtggagtttgtgcggtttttgtgagcatcgacaacttgttttataatccaaccgtggtagctctcaagtcagagcgggaagcgtattcgcgcaatgagaggcaacgtgactatgaagacagaccctttttgaagctggtgaaaccacttcgtgaccgtcctatcagttttatttccccaaatgatgaaaatagcaggattcctcattagttggatagtaaaataaatagttgttgagctttaaaaaaaaaacaa

SEQ ID NO: 4321 - DNA, 144 bp, Cyanidium caldarium
  Clone ID: LIB190-033-Q1-E1-H9
ggtcgacgcacgcgtccgtacattaaagagggtagcgatattcttatttaaaaaaaaaaaaaaaaaaaaaaaaaaaaaaaaaaaaaaaaaaaaaaaaaaaaaaaaaaaaaaaaaaaaaaaaaaaatacacataaagaaggcgac

SEQ ID NO: 4322 - DNA, 446 bp, Cyanidium caldarium
  Clone ID: LIB190-034-Q1-E1-A10
ccgggtccacccacgcgtccggacatcgctacgggaaatggagtcaaaggcaatccttggtttctgtgtactttaggaatggcaagatattactttgaattagccaaacgattctcggaatatgcaacgctgaatatatcttctcgttggatgctacctctattagaacatttgcgaacgtcttatttcaagttgaatccatctatgccatccacttttcatgttggagagactcttcagaagccacaattgtgtcagattgcacaagctttgttaacagaagcggataaaattctgtattctgtttatcgtcatgtaccagattcaggtatgttgacggaagaaatcaacaggtatacgggattcgaacaaggagcaaaaaaccttacatggagttatgactcgtttgttactgcagtctggagcaggaattattccttgaacac

SEQ ID NO: 4323 - DNA, 382 bp, Cyanidium caldarium
  Clone ID: LIB190-034-Q1-E1-A11
tacggtcctaaattcccgggtccacccacgcgtccggaggaaagaacgtttcagttcaaagcaacttatcttcaatagtaatgacgccacaagggacgataagcttgtcttatacagacaagtgctcttggaaaattcgaccagtttacttcaaatgtctttccgtcaacttttgttcaagtctatgtggaagagaaaagagagaacactgtatttgaaagctgacctagtacaactggtgcgtcttgccgagttgaggtgaacaatttaaatgaaatgaatagtctcatgtaccggaataggttcacaggtaatttttttagcagtcacgtggtttcctgacgatggaaactcgcaaagaaaagttttttgatcaatacag

SEQ ID NO: 4324 - DNA, 462 bp, Cyanidium caldarium
  Clone ID: LIB190-034-Q1-E1-A12
taacggtccgaaattcccgggtccacccacgcgtccgctggaatttccagtgtccttgcggctccattattggcaggaattccactgacacacaaagtttggagcaaaagtgtgacactagcaactggacatgatttgtcacagttagactttgagtggctggcaaagtcggaaactttagttttcgtcatggcaaccaggtcattatctgaaatagcacaaagactagtagaaaatggcaaatctcctgatactctcgtagcagtaatatacaatgctggaatgtcgaatcaacacgaaagctttggcactttgaaggagtgggcattgggaagtttaaaggtctgttttgaaccaggaacggttatcattggaagagttgttcagtacgcctttgaaaaggagaccttggctccataggaggagctttgtagtcatttggagttgcatatttggagaaaa

SEQ ID NO: 4325 - DNA, 330 bp, Cyanidium caldarium
  Clone ID: LIB190-034-Q1-E1-A3
ctgttttctttattttgagtgtccttgttttccttgcgttatgcaggataattacttgatatctagtgtcgtcgcgtgagatagagtgttactcgtttgtatcgtgagcataaacaacaggtagttcctaaaaaaaaacacataacagagagggagcacagacaatcagaagtacaaaacatacaactaggggggtgggctgatcaacaaaaggccagatgaataaaaaaaaaaaaaggggggccgcccaagaggatcaaaccttacttagccgtgcatgcaacgtcaaagcccttcaaaaggggcaccaaaattcaattcacgggccgt

SEQ ID NO: 4326 - DNA, 397 bp, Cyanidium caldarium
  Clone ID: LIB190-034-Q1-E1-A7
ccacgcgtccgacagaaacaactggaattcacctagtagcggcgagcgaagcgggaagagcccactatgagaatcctctttttcttttgagaaaagaggagatgtatttgaaaaaagacaagaaatatctgcagcaagaaaagagcaaatttcctggaatggaatatcatggagggtgagaatcccgtttatctcttttctttgtatggaagctgcgttacgatatttcttgttgtggagtcgggttgtttggtagtacagccttaattttgtgggtgttataaatcatccaaggctaaatacgtaaagagagaccgatagcgaacaagtaccgagaggaaagaggtgtatgatgcaggcaaagaagtgacgcagtagattagagagtaacacatgc

SEQ ID NO: 4327 - DNA, 439 bp, Cyanidium caldarium
  Clone ID: LIB190-034-Q1-E1-A8
ggaatcatgggactgaccacgcgtcgggcagagttaactaatctctccagatgaaacgagaatgagtagctgttagccaaaaaagtgcaataaatactcaaagttttcaatttattatttctgagaaagaagaagaatgagaacgaggcactattctaaaattatgcacgaccctcgcaagcccatttggagtagaaggcttttccgtggtttgtggttccgagagcggagaaagcgtcgtatcgaacgtgattatggaactcttccgtctccagcccccttgaattcctatacaatgtatggtggagcaacggaagcgttcttactttcggcctttcttagtttccttgtactaagactaacagatgtaaaggacttgttgggtctttaaataaatcttgagtattttcgtatttataagtaacgcgaacggttgaat

SEQ ID NO: 4328 - DNA, 455 bp, Cyanidium caldarium
  Clone ID: LIB190-034-Q1-E1-C10
gtccgaaattcccgggtccacccacgcgtccgcaacttctggtctatccaataaacttgctgccggtatttttggtactgctgttgcaaccatgggaatgttatctacgagttgtttcattttggcaatggatgttttcggtcctattcagataatgctggaggtattgcagaaatgtcaatgcaaccgccggaagtacgagaaattactgatcgtttggatgcagtcggaaatactacaaaagcattgaccaaaggttacgcagttggttcagcagctttagcggcatttttgctgtttcgtgcttatatcgatgaagtgaacaactacttgccgtcaaatcgtgctcttacttctgtggacttgagtcaaccggaagtgtttgttggtggcatgataggtgcaatgttagtgttcctattctcgggcttagctatacgtgcagtcggtaatgc

SEQ ID NO: 4329 - DNA, 460 bp, Cyanidium caldarium
  Clone ID: LIB190-034-Q1-E1-C11
ggtccgaaattcccgggtccacccacgcgtccgcacacgcgtccgcccacgcgtccgtatttaatttgtggagaaagcggtgttgggaagtcttcattattgcgaactttagctggtttgtggaacgatggcgagggaaagattagtataccttccccagagagtacctttttggtgccacagaagccttacattgttcttggctctattttagagaacatactatatccaaagatggataactttgatactttctccagtcaagacatttcaagattgttagaagaggtcaatttgagtcatttaattgaacgtctgggtggcatcaatatttccatggatttaagcaacatcctcagtcttggagagcaacaacgactggcgtttgctcgtcttttggcaagtaaaccaaagtttgttttcttagatgaaagtacaagtgcactggatgaggacaatg

SEQ ID NO: 4330 - DNA, 346 bp, Cyanidium caldarium
  Clone ID: LIB190-034-Q1-E1-C12
attcccgggtccacccacgcgtccggatcgttccagcttataacttgccacctaatgcagaacatatcaaagttctccgagtagtaattcgagaaactttttccagagatttgtgtgatatgttgtggagagatttaatgtggacgttggaagaactggacagaaaaactccagattctatccatcatgccagggaattgctgctggaaaggaatcggcaaaaacacaaagcatttgctcatatggagcgccaaaaacagaaaaccaagggagtttgttagttttggataaaggactgttgttgttgttgtagtgttttatgaaggatatttgataattgcaaaaa

SEQ ID NO: 4331 - DNA, 429 bp, Cyanidium caldarium
  Clone ID: LIB190-034-Q1-E1-C9
tatacctaatgcaaccatcttaaagaaagcagaattacagcttgcattggtatccataggattaccaggatattatgtctcgttgtttgcagtggacaagtttgatcggaaaacttggcaaatatttggattgtttatgatgggtggtataagtattgttattggaggtgttttgccctatttgaagtctgtgcctgctgcatttattataacatatggaatatatttcttctttagtatatttggagagtgcactacctatatgattccatctgaagtatttccaactgttcttcgtggcactttttatggaatagctgctgcgtttggaagaacaggtgctgttgtgggaactcaaatatttgaacctattcaaaaggcagttgatactcatagtcatagcaatattttaggtgctccagtagtttt

SEQ ID NO: 4332 - DNA, 273 bp, Cyanidium caldarium
  Clone ID: LIB190-034-Q1-E1-D10
ttcccgggtcacccacgcgtccgcacacgcgtccgcggacgcgtgggcgagaatcgatttactctttttggcgccaacacagaagtcactgtggaagacttaaaacttcggatctatcagatgaactacacgtgtcacgctggttcctctcttaataaacgaaaatcgggttctaagatttggaaaaaaaaaaaaaaaaaaaaaaaaaaaaaaaaaaatggaaaaggagaaaaagaactagaaaaaaaaaacacggggtggtagccacgtcgg

SEQ ID NO: 4333 - DNA, 446 bp, Cyanidium caldarium
  Clone ID: LIB190-034-Q1-E1-D12
attcccgggtccacccacgcgtccgcccacgcgtccgcccacgcgtccgcggacgcgtgggaaaaaggtaagaaagaggcaaatacgggaaagcagtaaaagaagaaagagaaaggaaaaaactgagtatcaggaagaaaagagggagtagatgaggaaagaaagatcaaggaaaggtttacgagagaaggaagtagaaagaagagagtgtaaggcggcgtcataatagaaatccgaaaggagtagaagaaaagagagagaagaaagaaaagaagagaaaagccgtactgaagaccgacacaggtactcgaggagaaaggagacccaaattaaggtgagagaatggacgataaggaactaggcaaaaggatatggtatctgcggtagaacatatgaaagaagcagcaccgactgtttagcaaaaacacagcactctgcagaaaaga

SEQ ID NO: 4334 - DNA, 231 bp, Cyanidium caldarium
  Clone ID: LIB190-034-Q1-E1-D9
ggtccgacattcccggggtcacccacgcgtccgaagacgcgtgggggtggtccaagttgggaaaacgacgtcgtcgaaacaagtcgtattgcacagtggaattggatatcgacggctattatggataacaaaataggaaagcgtggaggtactttgaaagacgtttcagcaacagacgtcatttcaaattaacgcaaattttttaaaaacgcaaccgaaaacttgaaactg

SEQ ID NO: 4335 - DNA, 466 bp, Cyanidium caldarium
  Clone ID: LIB190-034-Q1-E1-E11
cggtccaaaattcccgggtccacccacgcgtccgtgagttgagaccggaagccaaacaagttgtttcgttttttagagaaaagcacaaaatggagtgttggttagtaaccggtgataacgatagcactgcatttgcagtagccagagcagtagggattccgatggagaaggtggtttctcaagcattgcctggggataaagttaaagttgtagaaagtttattgcagaaatatcaaagtgcaacaggaaaggccaagtctcgagtcgtatttgttggagatggagtgaacgatggtcctgcattagctgcagcggatgttggtgttgccatgggcacgaagagtcaattaacagcaactgcagctcgtgctattttaatgactgataatatttctggacttgcgacactgtttcacttatccaaagtcacctttcgtcgaattctgctcaactacttttgggcact

SEQ ID NO: 4336 - DNA, 389 bp, Cyanidium caldarium
  Clone ID: LIB190-034-Q1-E1-E8
ggattcatggcatgaccacgcgtcgggcattgggcgatgaatacatcggcagaggcgctcttcggcgtacaacctaacaaggaagaactgaagaaagtattgcaagtaaacgcaataactttagcaacatattttgctattattcgtgctacaccttttgttatcgatgtagtaaaggctattttcgagaaagagtagaaggcttgagttttggttttgttggcttgtattcttggaatgttacccaactgaagaatcattggaggctagatatgttgtgagtgttttctggtgtcctttgtgttgacagtttgttttttttgaaaaactaacaatatgatacaaagtgcagaaaaaaagtctccacgtgcagtgcccagcaccaatcg

SEQ ID NO: 4337 - DNA, 456 bp, Cyanidium caldarium
  Clone ID: LIB190-034-Q1-E1-F10
attcccgggtccacccacgcgtccggaatcgaatgtgtggggaatgttccacaccttgagactttatcagaaacctcaacattctgcttgtcacatatatccagcttttgcttttccaacaattgtatcccaggtcttcttatcgtacttgttgagattttcaaggtggcgagaatatcgaggtggagaaccgcaaatatgttctctttgtggaggccttcgtgttataccttgtgacgtctgttcaggtattggtaaagtaaacaagggtgtatttaatagaaacaacagtttaagaaaagactccttggttggttctccttggacagctgttgttccaatccaagggagacgtcactttgtttgtattatgaaaaagggcaaaggcaaggatgttattgcagtcttacagaccacttgtggcaaaaaagagtctagaatttccgtagaagtacc

SEQ ID NO: 4338 - DNA, 444 bp, Cyanidium caldarium
  Clone ID: LIB190-034-Q1-E1-F11
ggtccgagcattcccgggtccacccacgcgtccgaattctgctggacctgacattattgttcgagtgtctgtgcctatagatgctagttcttcgactcgcaagaagagacagtcttctttgacccaagtatctatggatacaggttccaagaagagaagagtctatttgatagggatagcattgaaatgttatggaaagtctggtgtcggcgtcgctaggattaaggaggaagttaacaagtttctagtcccagtttcgtcacaattggaattggagaggaacgatatttgggctattcagttggtcgtgagtacaagttacaataatgaagtatccaatcattttgtacataagcagaactgggtaatcgataccagaaaaaaggtttcttcttcgtcatctactccttcgcatgatatgaattactcgagctccgattaaga

SEQ ID NO: 4339 - DNA, 466 bp, Cyanidium caldarium
  Clone ID: LIB190-034-Q1-E1-F12
ggtcctaaattcccgggtcgacccacgacgtccgagatgaagcgttgcgtaaaggggagttgggtttcgcaaaaatattttatgaagctttacaagttgttggtgaaccacccgacttgaagaaaaagattccatctcagggaggagaaacaagaaagaaacccacaaccaccacaaccacaaccaccacaacgaatagtttggatacttgtcttgaagttgcattctcttcatcgatgaatggcgatgatgataataataattgtttcgtatcttcgaatgaagagaagagaatatcatctccagagtcggacgcttcagaacagacgtttgtggagcctgctgctggtagtctatgggacaatcaagaaatgtttggagatgcatcgattgattcggaaggaattccgttcttgaatgacactcacgttagcagtgattcgatgaaggtatcttccaacaatgc

SEQ ID NO: 4340 - DNA, 462 bp, Cyanidium caldarium
  Clone ID: LIB190-034-Q1-E1-F5
ccacgcgtcggcccacgcgtccgcccacgcatccggaagagccaaagtcgatgaaagcagtttcctatgaaagcacgcatagtggaaaagattccacttcgtttctgtccgttgctgcatcaacaaccgataaccggaagacgcaaatatccgatcattccattccatcctcttccaatacaaatatgagcgattctaaggagaaacaacagcctattcaatgtaatgatgatagtttggaagaatttcttcatatggataaaaaaccaaaacgaagtataagagacaaactcaagcaagtctaaaaggaataaatcatttatatgcgtatatatatagtattaagttcgacccaggggtggaaactcatgaatataagaggatgcaggttccttggataaataaatcgaaggctcattggatgcagtaggaatagagccatttggtaaaaaaaaacaatct

SEQ ID NO: 4341 - DNA, 410 bp, Cyanidium caldarium
  Clone ID: LIB190-034-Q1-E1-F9
gtaacggtccgacattcccgggtccacccacgcgtccgacaagagaagtcagcagtggggaaaattgggcaatgtacagggaagtatgacccagtaatgaggagtggagtaaacagaaaaggaagtaaaaggagggaatgaagggaagttatggcaaaaacacgtgccagcagcagcggtaaaacgtgtgtagcaagcgtagagcagaagaactgggtgtaaaggtcgagtagtagagtaagtgtaaaagggaaaggaaaggagagaaagaggaaagggatgaaatgcagagatctctagagaaaggcaagaaagacaagaaaggaagacacagtaaatgaggcgagaaagcataggaagtgaaacggattaggaacccgtgtagtctatgcagtaaaagaaagaacaac

SEQ ID NO: 4342 - DNA, 133 bp, Cyanidium caldarium
  Clone ID: LIB190-034-Q1-E1-G7
accacgcgtcgaccgacgcgtgggtatagggacattttttgtttcgtttttttttattctttcctccgctctatcatcatcgtttcttgttcttctaaaatagacaatcgaatgcctttacctttcggcaacg

SEQ ID NO: 4343 - DNA, 432 bp, Cyanidium caldarium
  Clone ID: LIB190-034-Q1-E1-H11
tattaagcagaatttagtagtgactataaatggtcgtgagcgatttcttttagatgttgccaacgtgttgggtttttactgcacagctgtgtcagcggaagaaagggagtttatcaagttgatatatcctaagttcgcattgaagtttgtgaaactgtcatatgagaagcatcctcccattcgttttcttcacagtatattttcattgattcgcccagaggactcaccttctactcgaggatataagtttcaagtattactttcgcatattctttatgtgcgatggagtttttgtaagcaactgggagaattgagtatatttcgccagagtttggtaaacgagataccaaattgtactgatgaatacattgccagggttgtgccgtcgtttaatgccacgatagatgaggaacatagccctagtggaaagac

SEQ ID NO: 4344 - DNA, 242 bp, Cyanidium caldarium
  Clone ID: LIB190-034-Q1-E1-H3
gcgtcggctccgcgcgcatctttgttaacgagaggcattttggatgccatctccggtggaattttaatatacacaggattggtggagttgttgacttattggtttacgcgcaactcgaactttttaagacgcaaagccatacctatttttagtattgtgggatttgtctggttacgagccatctgcatggcgattatcggagcgtgggcctaagaataaaatttgtttgagaaaaagacagt

SEQ ID NO: 4345 - DNA, 464 bp, Cyanidium caldarium
  Clone ID: LIB190-035-Q1-E1-A11
cccgggtcgacgtacgcgtccggatgagggccaacgctggtcaagatggccttgtgcaagtcaacaaacatagaacagtaaagagattgcaagaagataatattttgaatagagcactatcacaaccaggagatgtatttctgtgcttttgcaacatccagttgttggtgaatgcagaaagagctatgatagggaatattacttgtccagaaagtatcgaattgtgtcgtctattagctggacatataacagtttggttcgatgaacatttggatgactttcgtttggaagctatcttgggagcactattgtgtacttgttaatgtgagtggcagcgttttgaacgagaattggaggtacaagaatggaatgaattggtgaagatatcttccttagatacttggaagcttgtgcttggtacaagacaaagagtggataatatgttacagcgagtacacaagctg

SEQ ID NO: 4346 - DNA, 405 bp, Cyanidium caldarium
  Clone ID: LIB190-035-Q1-E1-A2
gggtcgacccacgcgttcgaaccacccgttccgaaaaacccgactcgcaatgccgtagatttcaatcgagtctggtgtcaaacaacttttttggcaccatcagattgtccacatgtcacaccgtggcatcagttagtattgggacgttttcattcaatggtcgagtaacatgctcccttctctaacctggacatgcattggcatcaacttgtttgatcacacctgtatacagtatcaaagcgaaaagattgctatacagtggcatatctaggcatccgggagccttgtgaaatagaggacagtccatgccctgattaaattcaaagacagattcccatgaaaccatttggacaatttgtaccagtcgaagaagatagatatcaactcaatacagtagtattgcac

SEQ ID NO: 4347 - DNA, 415 bp, Cyanidium caldarium
  unsure at all n locations
  Clone ID: LIB190-035-Q1-E1-A5
taccggtctagaattcncgggccccggccgacccacgcatccacccacgcgtccgcccacgcgtccgcccacgcgtccgcccacgcgtccgcccacgcgtccgcccacgcgtccggcaagaaaccgatgcgcaagtagttcatctcattcagccttccaagttgtccgaaatattgaaaacaacactgacgggtggtctatatattgcactattacttgcgagtgatggttctttggtagcaggtgcgaataatcctacaaaggaaaacacgtcaaacacagagttgcctgagaacagttggtcttctatcggagcgttaatagcaggaacgtggtcagtgttggaagatcgtgctagaaactcccatatgggtgagtctactggagatgagtaccttctcttggattgtacaaa

SEQ ID NO: 4348 - DNA, 377 bp, Cyanidium caldarium
  Clone ID: LIB190-035-Q1-E1-A6
acccacgcatccaggcaaatacgggaaagcagtaaaagaagaaagagaaaggaaaaaacctgagtaccaggaaaaaaaaaggaattaaataaggaaagaaggttcaaggaattagaattaggaaaaggattatggtgaatgaaaccaggaaattatttgaggagaaaatgtgtaacgcctaccttttgcataatgtcccaccgagtgaaagaggaagcacaaagaaagaaaaagaagtatccacataagacccgaagctagatgatcttatgctgtccaaacgaagtatggctgaaccactatctgtggaaaaagatttgttagagatggcataatgggtgaaaagccactcatcgctactgataactggtactcct

SEQ ID NO: 4349 - DNA, 420 bp, Cyanidium caldarium
  Clone ID: LIB190-035-Q1-E1-A7
attcccgggccgacccacgcatccaatccgatcacctagcgatagttttgtgtgtgaaatagagtcctcacaaataactgtctatcaattgaaagagaaaattagagagaaaaatccccggtggactcctgctcgacaacgtttgagcgtccaacaacaagactcgaaaagaatcattcttgaagacaaccaaacactgcaaagctatgatatcaaagacaacagtgttatttatatgaaagacttggggttacaagtgtcttggaagttggtgtttttcatggaatatttacgtcctctcgtcatcgttcctctgttatccttacaaccaagcttgatttattcttcccgttccaaagcacttggaacagaacaaaagattgccgtggccgcttgggtccttcattatgccaagccaaa

SEQ ID NO: 4350 - DNA, 395 bp, Cyanidium caldarium
  Clone ID: LIB190-035-Q1-E1-A9
acggtcggaattccgggtggcccacgcgtccgcggattacgaacccgtgtagtctatgcagtaaaagaaagaatgagtaagaaaaaaaggagtcattccaccaggggagtaaaggcgcaagaaagaaacccaaagcaattgacgggaatcggaaaaaggggtggatcacgtaaattaatccgataaaccgagaaccttacctctccaagaaggtgttgcacggctgtcgaaagaacgtgctgtgaagtgagagaacgtacgagaaagccaagtgaggaaaagaaggcaagtagagggcggcccgagaaaggagagggcgtaagacgtgatacagagtacgaagaaaagagaagagagctagaaaggaagtaaaagaagagtaaaaggactagaag

SEQ ID NO: 4351 - DNA, 220 bp, Cyanidium caldarium
  unsure at all n locations
  Clone ID: LIB190-035-Q1-E1-B10
ggtcggagttcacgggtggacncacgcgtccgcccacgcgtccgcttggtagcagttgtacattcaacatcatcaaatgccaaagggaggaaagaaagattcttcaaagaaagaagccacaagtaaaccggaagcagcagatgcaacaaggacaacagaaaattcgggtccggaagcaaagttgaagggaacgggtgcaaagaaacattaaaaagttgac

SEQ ID NO: 4352 - DNA, 328 bp, Cyanidium caldarium
  unsure at all n locations
  Clone ID: LIB190-035-Q1-E1-B12
acccgtccgagatggcataaggggtgaaacgccaatcaaagctagtgatacctggtacccctccaaaaccaaaataattaccttatcaagaaaaaaaaaaggtaaaggaaaaaaaggaaaaaacaaaaaggaacaataaccaaaaaggtgaatatccaaaaggaagaaacccaaaaaccaaaaataaaggtacaagagtanacatataaagatcaagataagaagagagggtacgcttagaagcatcacaccatataggaaagcgttaaagcatgaaagaaaataaatccgaaaaagaagagaaaaaggtaagaaagaggaccgaatc

SEQ ID NO: 4353 - DNA, 404 bp, Cyanidium caldarium
  Clone ID: LIB190-035-Q1-E1-B4
cccacgcggtcgaagcaagtctatgttatctcctttattggagaaatatcccaatattatgattgccggtaaccatgatcgatatacccgacaaattgccaatttgctggaagaatattttggagattatctgcgaggtggaaagcaatgggacgctggaaaatggaaagaggaggagatgaaagacgatgcatttccccgagtttatgaccacgcgagatggtttgggttgaaaattgttgtattggatcaagttgggtattggagagacagagtacgattgaaccaatgatatgtggttgtgtaaattaggcgagacctaccagatggtcatttggggagaattccgcaccacaattgcaccgatttgagcgactattttaggaattggatgcgtctcgttg

SEQ ID NO: 4354 - DNA, 428 bp, Cyanidium caldarium
  Clone ID: LIB190-035-Q1-E1-B6
attcgcgggtcgacccacgcgaccacccacgcgtccgagtgtttcgtctccacggagaagacaccgtcatcgccgacactcatattctccttcttattcttcttctatgtcacgttcggactcgtattattcttctgattattctagagactattcttcggattcgcgatcgtatgatagtgctagtcgttctaccgagtcgtctcggtcgcctcgtaggagaaagcgcagttattcacccagtcgttcggactcaagaagttattcggatgcgtctcgttctcctccaccgcgacatagaaggagacgagcaagtccgagctattcgaggtcaccgtcgcgttcctctcgttcggtatcccgttctcctcgttcggtgtcgcgttctcctcggtctagaagcttgagtcgttctcctgttggaaaac

SEQ ID NO: 4355 - DNA, 412 bp, Cyanidium caldarium
  Clone ID: LIB190-035-Q1-E1-B7
aattcccgggccgacccacgcatccagagaaagagaattcgagaaaagttgaaactacttcaggatgatattgtagaggtaagaatattgccgagcaactggctcgttggacaaggtttcaacaagcccgttccgttgcttgttacgtgagtttttccaaagaggtggataccaaagaaatactgagacttgtgttcgaatcgaacaagcgatgttttttaccgagagtggaagaaagtgaccacttgacattttatcaggcagatagcttggaacaaatatattcttgggaacctaatcgttggggaatacgtgagcctccagttacacagccggtactttgtttacaacgagaacctttggatatggtcatagtcccaggtcttgcttttgatagaatgggacatagact

SEQ ID NO: 4356 - DNA, 290 bp, Cyanidium caldarium
  Clone ID: LIB190-035-Q1-E1-C10
cgtccgcccacgcgaccggtacaagtaagaagactgtgttacctgggcacaacggagaagttgttgttggaaatactttaacagttactatgagctgtgatcatcgagtggtggatggcgcagttggtgcaagatggttgaaaactttcaaagatatcatcgagaagcccatcaacatgcttctttaatgacgccatattctttgtatgactaccgttttctactgaagctgttgcgcccatttcaaatgtgccttttgtaaagcagcttactggactttaccagaaaaa

SEQ ID NO: 4357 - DNA, 472 bp, Cyanidium caldarium
  Clone ID: LIB190-035-Q1-E1-C11
gtcgaccgacgcgtccgggcaacctcaacgaagattccttcgaatctctggctggtgatatttttcgtatgaagaagactatactatttctttgcactggaaacagctgtcgctcccagatggcggaaggattctgtagaaagcttcgtggtgatgagttcgagccctattcggcaggagtcgaacccaaaatgttagacagaagagcagttgaagttatgaaagaagttggcgtggatatctcacaacaaaaacccaagtccatccaagaattaccaaccaaagactttgacttagtggtaactgtttgcggtcacgccaacgagaattgtccactttttccaaacaagacaaaagttattcacgtcggctttgaagatcctcctcttcttgcaaagaactgctcaacagaagaagaagcattggaagtttatcgacgagttcgtgatgaaattcaagggtttatccaaac

SEQ ID NO: 4358 - DNA, 413 bp, Cyanidium caldarium
  unsure at all n locations
  Clone ID: LIB190-035-Q1-E1-C12
gtccggatataatatcgatgttcggcctggagtttccgtttttgatgtcgttcatcgaaaagttctgaggatatgaatgagcattcccgtcttcagttgcaactttttggntgggaagacaacgaacatatcaccgaccaagttgtgatagcggttggtatcacacctcgccaagagttggcagaacaagcaaggttagaaacagatcccgttgctggtggtattcgcgtcaatgcagcgatgcaagtggaaggtaatatttatgctgcaagagatgtcgcaagtttctgggatcgcgctttgggtagacgtcgtgtggaacactgggatcatgcactagtcactggtagaattgctggtgagaacatggcnggaggaaatgtaacttacgactgggaatctatgttctggtg

SEQ ID NO: 4359 - DNA, 406 bp, Cyanidium caldarium
  Clone ID: LIB190-035-Q1-E1-C5
attcgcgggccgacccacgcatccacccacgcgtccggtaagccgcttttagtgaactcttttctatggctcctgttacgacgcctttgtttggcacttcccctaaaactaccaatcgagaagttgagcactggatgaacaacctgaacgaagttcaaagtgttattcgttcggtcgaaccaaagttaaacagcactgggggaaagtggaaggctgttgctcaacacgtaaaggaagtttcagacgaacttagtcaaatttttaacaaggaagaccctcattttgacgtcattgtcgctggagtaaactctggtagaaagtttgaaaacagtcaaactgaaatcgccaagaatgatgtggtaagagagagggcacttatgaggttgaagaagtacagcgacgagat

SEQ ID NO: 4360 - DNA, 390 bp, Cyanidium caldarium
  Clone ID: LIB190-035-Q1-E1-C6
ttcgccaaaaacaaacttggtcctctttgcgataatgatccaagttttatcgaaagatttcaggattatctagcgcttctagcatatgaagatccagaaaagtcacccgagtttcacctcatgtcgttggaggaacgcgatagaactgcggaagaagtcaatggttgtttggttaactttcaagtgtattactctttaggtcttcttggaaggttttcgttattggaacgactgattcgtcagctgggagtgactatggacacattatctgaactttccgattccaacaaggaaaagaaatggagcttacatgattatgttatttgagaagatatatgttttgtaaacgaacaagaagctctttctacttggaaataaccagttaatccg

SEQ ID NO: 4361 - DNA, 457 bp, Cyanidium caldarium
  Clone ID: LIB190-035-Q1-E1-D11
cgtccgaaacttgtacatcctttttggtttggaagatgggagggtatgaaaatattgaacgaggtcctctaaggctgaagactggtattatgaagaaaaagaagaaaaaaggcaaagttgaagagcaggagactccgaaagtcgctgtaggaaagacggaagcagagaagaggttcgaagaaaagaaaagacaacgtgaggaacaaaggttgaaagaggaagcacaactttcttaccgttccaagatagaaaaatttaacgaacagcttagagaagaaccagaacactttgacgttccaaaggtgtgcccaacaaagtaacaagagttgcgacaacattttgcaaaatatcagaaaaggttccttcaaaaaagaattgcaaagacgtaagtttaagaaaaccttgggttaacaattttccaaacaatccgaagcacgaacaataatatactcctccc

SEQ ID NO: 4362 - DNA, 383 bp, Cyanidium caldarium
  Clone ID: LIB190-035-Q1-E1-E11
ggtcgcccgacgcgtccgcccacgcaaccgcccacgcgtccggtaagatcgttttatggtggctgaggacttgacctttcagttctttgcatttttttcttggactcagagaacacttttcaaacacacctgtaaatgttcacaacataaattcacgagtcttccatgcagagtatcgtcagcgaaattacctgcgatacggacttttcctgttgttaccatgggattgaacgactcgtacagagaacgactaagtatattcgatcttaccgtagaagaagtcgctgaagactacggcctacctttggaatacgtcatcgatgtacttatcagtaatggtgtggaagaacctgtataccctaacgacgttctgtcaagccgag

SEQ ID NO: 4363 - DNA, 413 bp, Cyanidium caldarium
  Clone ID: LIB190-035-Q1-E1-E8
aattcgccggtcgacccacgcatccgcttattctcgttatttttgtaacttttgcactagtcgaagctggaaagagtcccaaaataacagatagagtatatttggatattcaagtcggtgacaaacctttgggaaggattgtcataggcttattcggcaatacaacacccaaaacagtagaaaactttaaacagcttgcaacccatgaacacggatttggttacaaaggaagtaaatttcaccgagtgattaaaaactttatgatccaaggaggtgactttacaaagggagatggcacaggctgaaagagtatctatggcgagcgattcgaagatgagaactttaaaataagacattccgttccaggacgtgtctcgatggctaatgcgggaaggaatacaaactgctctcag

SEQ ID NO: 4364 - DNA, 397 bp, Cyanidium caldarium
  unsure at all n locations
  Clone ID: LIB190-035-Q1-E1-G6
attgncgggtcgacccacgcatccagcgtccagtatgaaaggagaaacgagtgtagcactgtctagtcgtccaactcagcgaaacagcaataactgtgaaaatgcagtaaactagcagtaggacggaaagaccccataattcttgactagataggtttagggaggagagagaatcatgaagtagaggaggtggggtaagagatgaaagaccactgcatgaggataaggaatctaactgagtaaggaaaataagcttaagctagtttggctggggaagtaaagcctaagaaagagtaaattaggcaagcaaaggcatgagagaagtataatagcagaagcatgcttgaagaaaaagaaagagatttcagaaagggaagaaaagtcagctatagagaac

SEQ ID NO: 4365 - DNA, 448 bp, Cyanidium caldarium
  Clone ID: LIB190-035-Q1-E1-H9
gtcgaccgacgcgtccgcccacgcgaccggctgctgctgctgcatggaaagaattgtaggcggtgatggtttggtagaaacgacgcgaagcaagttcaactgtacttgcgtgtgtgtattcaatggaataagtaataagtgttgattggccttgtaactttgttgaggtatgtaaacaacccttgatgtccgtcaagaggttgatgaaaaaaatcatgcgcgtcgacagaagtggtaccatctgcgtgttttggtaccgcatatgaagatgccttgctaagctgactctttcatcgtgctagagttgtgctataactttttaaaacttgttttaaccgttgttgagactaggtttgttggttatttgggttttatatatatatatatatatatatatatatatatatagagagagagagagagagagagagagagagggagaaaactg

SEQ ID NO: 4366 - DNA, 422 bp, Cyanidium caldarium
  Clone ID: LIB190-036-Q1-E1-A10
cacgcgtccggtagatacccggtggggatgagcagaacagtaagcggaggaaaagaaaccagttggaattcccctagtaggggcgatcgaagcgggaagagcccactatgagaaacctctttttctttggagaaaagaggagatgtatttgatacaagacaagaaatatctgcaagaagaagtagagcaaatttcctgtaatggaatatcatggatggtgagaagcccgtttatctcttttctttgtatggaagctgcgttacgatatttcttgttgtggagtcgggttgtttggtagtacagccttaattttgtgggtgttatcaatcatccaaggctaaagacgtagaccgagaaccttacctctccaagaatgtgttgcacggctgtcgaaagaacgtgctgtgaactgagagaacgta

SEQ ID NO: 4367 - DNA, 266 bp, Cyanidium caldarium
  Clone ID: LIB190-036-Q1-E1-A11
gagtcgtattaggatgagcataacagtaagcgtaggaacataaactaattggaattcccctagtaggcgcgttccaacaggcaagggactagtatgagaacactcttttaccttggcttaagaaggaaatctactgtgatacaaaacactgaatatccgcaacaagaatagagtaaattaccagtaaccgtatatcaataatgtttagaagcccatttagctcttttctgtgtatgtcatctacgttacgatatttcttattgtgg

SEQ ID NO: 4368 - DNA, 481 bp, Cyanidium caldarium
  unsure at all n locations
  Clone ID: LIB190-036-Q1-E1-A12
ttcgcgggtgcgccccacgcgtccggataaagtatatactctgttatcgagaccagatgctccatcgtctcttaaagaaaaaattccagtcgatgtttctaagaaaagtactgtggcgtcttcaacgaaacttgcttccaatgaggattcaaaatatccaacgcttccttctgttcgaataggctcggtagctggtcttttaagtttctttggagatgaaaggtgcatcgacttgtatcgactgggtcaacgattgcagttggatgtagatgacctttatcctcttttagaagctggagttattctaaatatactcaaagtaactgagggagatgttatgttgacagattcaaggagtcgattttcctgttgcgtctattgatgataagaagagcatggtacgagaagctttattgcagtcgggaggcgctcggttgattcaacaaatttatcggttgcttcaacannacaaacgagtgca

SEQ ID NO: 4369 - DNA, 374 bp, Cyanidium caldarium
  Clone ID: LIB190-036-Q1-E1-A3
cgggccgacccacgcgtcagagacacatcacatatcttcggaagaagtacaacatatagaaaagttgaaggagcgagacgatgaaagacgtagagaagaagctattgcaaagttgaaggaagtcggaaatagtgttcttggctattttggcctcagtgtcgacaacttcaagttagataaggatcctgcctcaggttcatataacatacgactagaaaagtagatttattacaaaatatcttaactactgtaaaaaactgcgctacgatatttcttgttgtggaatcgggttgtttggtaataaagccttaattttgtgggtgtaataaatcatccaaggctaaatacgtacagagagaccgatagcgaacaag

SEQ ID NO: 4370 - DNA, 282 bp, Cyanidium caldarium
  Clone ID: LIB190-036-Q1-E1-A5
cgagagatcgcgacgcaagagtgaagatggaacactggagtccttacaaagacgaacttgtagctacagcaaaggcgctggtaactcctgggaaaggaatccttgctggggatgagtctacgggcactataggaaaacgttttgcttccataaaggtggagaataacgaagaaaatcgcaggagctatcgggagcttttattcactactcctaactttggtcagtatatttcgggggttatcacttttgaggaaacgttgtatcacaggactagtcaaggaa

SEQ ID NO: 4371 - DNA, 426 bp, Cyanidium caldarium
  Clone ID: LIB190-036-Q1-E1-B10
taccggaccgtaattcgcgggtgcgccccacgcgtccggtattaatgatgccttgtttttagttttaccaggcttatcctttgttattactggtaatcgtatattctgtagacgctcggacttgaatgaaacggaagcattggagtcctgcttttcgtttatgaagatatgccccacgtacaagtcgttggagattcttttggaaggcgagcaaatttatgtagaagaactcgtgcctattgtatttcgtttcgttgaagactttcttcattttctttttgacaattggaaaaccgtaagttacggctctccctcgaagaaggacctacagtctggtttgtggagagagcaagcgcaaaactggattcgttcttttcgtcagctgtacacagaagtggagttatttatgaagatggtaaatacgat

SEQ ID NO: 4372 - DNA, 58 bp, Cyanidium caldarium
  Clone ID: LIB190-036-Q1-E1-B7
attcccgggccgacccacgcatccacccacgcgtccgcccacgcgtccgtgttttctt

SEQ ID NO: 4373 - DNA, 168 bp, Cyanidium caldarium
  Clone ID: LIB190-036-Q1-E1-B8
acccacgcatccagccacgcgtccgcccacgcgtccgtgtattcttaagcaaaaacatcaggtacaaaatcagattctgacagcttttggaaaaggatgaaatcgactcaactttgtcgggtgcgtcgtttcttagggtgtaatacttatctatgatgtgcgacttca

SEQ ID NO: 4374 - DNA, 454 bp, Cyanidium caldarium
  Clone ID: LIB190-036-Q1-E1-B9
ccacgcgaccgccaacgcgtccgagcagcaaaccagagaggaaagcgttaaagcatgagagaaaagccgtactgaagaccgacacaggtactcgaggagaaaggagacccaaattaaggtgagagaatggacgataaggaactaggcaaaaggatatggtatctgcggtagaacatatgaaagaagcagcaccgactgtttagcaaaaacacagcactctgcagaaaagagaaaatgtaaagtatagagtgtgcggcctgccaaatagtagagaagaaatcgatgaaagtgaaagcgagtaaaagatgaggtatagagaatggcggtcctaactgtaaggatccaaaggtagcgaagtaaatagacgtttgaaaggcgtccagtatgaaaggagaaacgagtgtagcactgtctagtcgtccaactcagcgaaacagcaataactgtgaaaatg

SEQ ID NO: 4375 - DNA, 424 bp, Cyanidium caldarium
  Clone ID: LIB190-036-Q1-E1-C1
cgggtcggcccacgcgtccgatattatttgtgcttggacaatggttgcaaagactgctctgagttgcctctttctctctttccttatcgctgccgcagttgcagccgacgtagtttcagaggagagatggggatatgctcagcaaacccaacaacagcaacagtgccaacaagtatgtaaacagtatgcatactatcagagtccagtctgcacttccgtaaccacacagagcccatactggacccaatgctcgaagactgtgcaaacctttgtcccaagccagtgcagtacttatacccaatctcctacatggacctattgcagcacctacaccaccactagcgtaccatctcaatgcagcaaggccgtgactacctatactcaaacctgctgtgcttatgcccaacaaacttcctatgcagtc

SEQ ID NO: 4376 - DNA, 469 bp, Cyanidium caldarium
  unsure at all n locations
  Clone ID: LIB190-036-Q1-E1-C11
gggtgcccccacgcgtccggcatctatgctcgttcaacatggcttttcttatacaggaaaagatattttatattcaggaatgacaggagagccattacaagcttatgtatttatgggtcccatttattatcagaaactaaagcatatggtaaaagataaaatgcacgccagagccagaggtcctcgtgccgtactcacaagacaacctacggaaggccgttctcgagatggtggtcttcgattangagaaatggaaagagattgtttgataggatatggtgcttcgatgctcattatggaaagattgatgcacagtagtgatgcttttattgctcatgtttgtagacaatgtggtttgattgtttccaaagattggtgtccaacctgtgcaagtgctctatatataaggccattgaaaattccttatgcttgcaagttgttgtttcaagagttgcaaagtatgaatatt

SEQ ID NO: 4377 - DNA, 461 bp, Cyanidium caldarium
  Clone ID: LIB190-036-Q1-E1-C12
taccgatccgtaattcgcgggtgcgccccacgcgtccgccaacgcgtccgggaaatgaagtttgtactcgtttctggcggggttatttctggtattggaaagggtcttactgcttcatctttgggagttttgctaaagtcgtgtggttggagagtgacaagtatcaagattgatccctacatcaatgtcgacgctggtacaatgtcaccttttgaacatggtgaagtatggtgctcgacgttgtttgtacaagaacttcatttatctaaaggtctttgtactggatgacggcggcgatgttgatttggatctcggcaactacgagaggtttctggacattaatcttacgagtgaaagcaatataaccaccggaaaaatttatcaacaagttattgaaaaagaaagacaaggactgtatcttggaaagacggttcaagtcattccacatgtaacggacgcta

SEQ ID NO: 4378 - DNA, 453 bp, Cyanidium caldarium
  Clone ID: LIB190-036-Q1-E1-D11
ccacgcgtccgccaacgcgtccgcccacgcgtccgaaatgtctcacgccttggctgttttcttatcctggacaacaactttttaaaaacgagattatttttaccaaatataagcatttttcagttgcttctttaaaggatctgagtggtgttgtgcagagttgcaatagtgttcgtgcgagcaaggcaaatgtgtcattactctcgtgttccaagtcaagaaaaccaaatggaaagcgactgttgcacaacgcagttgctgcttcgagtgttgcctcgtttggagatgcttggaacgttgttactctcacttatgcaagtgtcattgcagctggaggggtgactggttatgtaaggactcgaagtgttccttctctgttatcaggtgtcctatccgctttattacttttcgtttcttggtatcaaaattcgcctccacttgcctgtgcagtat

SEQ ID NO: 4379 - DNA, 461 bp, Cyanidium caldarium
  Clone ID: LIB190-036-Q1-E1-E11
ccacgcgtccgccaacgcgtccgcccacgcgtccgcccacgcgtccgctcatttaagtaatggagagagtttggatttttccgtcattcaaaagaacttgttaaatgcttatgttcgaaagaaaacacatattcaacgctcagaatggtatcatgctcgggtgcataagattattcattggtcaaaagaacagatgccaagacttttcacctctgcagtggatctcagtgacatttattcagagtttgtagagttggaaaacccctttgttatcgcatttggaatttctgctgtacaaaaagttcatcagagtattcgcctacttacaaaagtgttatttgaacgtgtggactgtagtttagtgagtgtggttcacccaaatccagagacagtgatagcactgtatcgtgtatatggcaaaggccgtttcttgggtggaagagtgcagtatctgagtagaa

SEQ ID NO: 4380 - DNA, 426 bp, Cyanidium caldarium
  Clone ID: LIB190-036-Q1-E1-E2
acgcgtccgaggaaatagtcatccacgacaaccattggatgcagccgattcgtggagacatgaactgtgatagtggagatcttttgtgaatggaaaagatgacaaaataactcaatcagaggctcaattgtgtcggttccaagacctgatatgtctggttgtagtttaacaggcaaagacaagtcgggtccaggcgaaaacatggtttgatgaacaaactgtgagactatgacagttggtattcgcacgtcaatccacaggaacacgagagtatctggacactcgtatcatgtccctcgattaagacagccgttgagatgacattaactcgactgatgatagtagtcgacagagagatgatacagaaaatcgatgtgcggtctacatgcatgactcgtttaatcgttttgtgaaacgagaaaatga

SEQ ID NO: 4381 - DNA, 383 bp, Cyanidium caldarium
  Clone ID: LIB190-036-Q1-E1-E8
gacccacgcatccaaaaaaaaaaaaaaaaaaaaaaaaaaaaaaaaaaaaaaaaaaaaaaaaaaaaaaaaaaaaaaaaaaaaaaaaaaaaaaaaaaaaaaaaaaaaaggggggcggccctacaggttgctcccttctttactcgtgctggcggcttcatcgctcttctcgtcgttccctattttcatctcttcggccgtcgttttataacctcttaattgcgattcccctgccgtcgtttaccttattcgccttggggaaaatccccctttttccaatttgcgtcttattgacgaggaccccccctttggtccttcccaaaatttccttacccccattggcgattggcatcccccctgtttcgtcgccttaatcgccgcgggtg

SEQ ID NO: 4382 - DNA, 410 bp, Cyanidium caldarium
  Clone ID: LIB190-036-Q1-E1-F12
ccacgcgtccgacaagcgttcagaagaatttgttgaagagagggccaagatggtgcactctatggaagtaaagaagaataagtttatagaacagtgggctgcctatagagaaaactctgaatatttatacaaatggacaccaaagcgcgtaataggaatcggtcttcttgtgggcgtgattccttattacttgtatcgctacattgtgtacagtgtggagaatcagtacccaaactatggagctgcagagtatggtttactaggaggttctcctccaaagtactcgagtcaagaagatgaaaataagtaacttgacaacgtcaccaacgacctaaagttgctccgttggcgtattatatgaaaactttatagacaagtttatttttttccctaaaaaaaaaaaaagatca

SEQ ID NO: 4383 - DNA, 493 bp, Cyanidium caldarium
  Clone ID: LIB190-036-Q1-E1-F9
taccgatccgtacttcgcgggtgcccccacgcgtccgcaaacagaaaaggaagtaaaaggagggaatgaagggaagttatggcaaaaacacgtgccagcagcagcggtaaaacgtgtgtagcaagcgtagagcagaagaactgggtgtaaaggtcgagtagtagagtaagtgtaaaagggaaaggaaaggagagaaagaggaaagggatgaaatgcagagatctctagagaaaggcaagaaagaaaagaaaggaagacacagtaaatgaggcgagaaagcataggaagtgaaacggattaggaacccgtgtagtctatgcagtaaaagaaagaatgagtaagaaaaaagggagtcattccaccaggggagtaaaggcgcaagaaagaaacccaaagcaattgacgggaatcggaaaaaaggggtggatcacgtaaattaatccgataaaccgagaaccttacctctccaagaaggtgttgcacggctgtcgaa

SEQ ID NO: 4384 - DNA, 483 bp, Cyanidium caldarium
  unsure at all n locations
  Clone ID: LIB190-036-Q1-E1-G11
taccgatccgtaattcncgggtggccccacgcgtccgccaacgcgtccgcccacgcgtccggaatgacctttgaatcgcctttttacaagacaaagctttcatttaaaagcaactcgttgtttctgcaaacttcttactttgtggcattcaacgaacgatgaagttccagtacgttagtcttttattggctctcttatgcgtaggttctgctctggctgctgaattggcacctggaattgcggaaaaaccggtagagagaggatatgaggaaccctgctgtaccgaatattgttattgggaagaaatatgtatcacacccacacccacacctacaccaacctactattactattattacgcaagaaatgcaaaacaggaaaatgtcgagagaagcgtagaaaagagtatctcttccgcagaaaaatctgatgcggttcgagggtattttcccacgtactactattatgagactcctaacatat

SEQ ID NO: 4385 - DNA, 384 bp, Cyanidium caldarium
  unsure at all n locations
  Clone ID: LIB190-036-Q1-E1-G4
acgcgtccaaccaaacgtccgcttacctctccaaaaaggtgttccacggttgtcaaaaaaacttccgtgaaattaaaaaaacttacaaaaaacccaattaaggaaaaaaaggcatttaaagggcggcccaaaaaaggaaagggcttaaaacttaatacaaattaggaaaaaaaaaaaaaaaacctaaaaaggaggtaaaaaaaaagtaaaaggacaagaagacgtacggaattcacgaagaangagcgtgaatgaangaagaatcccaagtaatcgangaagaaaaagcttcggtgaaagcgtgaacggattttgtacacactgcccgtcaagttctggaagtgtgctacgaataagcaggagaagtagaagagagtangaaaa

SEQ ID NO: 4386 - DNA, 426 bp, Cyanidium caldarium
  Clone ID: LIB190-036-Q1-E1-G6
ccgggtcgacccacgcatccaaagaaaagagagagaagaaagaaaagaagagaaaagccgtactgaagaccgacacaggtactcgaggagaaaggagacccaaattaaggtgagagaatggacgataaggaactaggcaaaaggatatggtatctgcggtagaacatatgaaagaagcagcaccgactgtttagcaaaaacacagcactctgcagaaaagagaaaatgtaaagtatagagtgtgcggcctgccaaatagtagagaagaaatcgatgaaagtgaaagcgagtaaaagatgaggtatagagaatggcggtcctaactgtaaggatccaaaggtagcgaagtaaatagacgtttgaaaggcgtccagtatgaaaggagaaacgagtgtagcactgtctagtcgtccaactcagcgaaac

SEQ ID NO: 4387 - DNA, 469 bp, Cyanidium caldarium
  Clone ID: LIB190-036-Q1-E1-G9
gggtcgccccacgcgtccgcgaaaatggaccactgtttgtggttttcttgctcgtgttctttgattttctgtactgtctttgtaggtttgttatatttaccatggctttacggagaccgaaacgattacaaaataataaaaaggaggagttttgctatgctcgtccttgcggcactatgctattgtgttacttacgcaattgtcataccccactcgtttttactaattgaaaggatggagaagccccgcagtatatctctgtccactacatttgtcttctcatttttacctgtcttgcttttgtttctgggaccttgcactttgaacattattgattttgcaacgtatatggcgcacggcttgtccgctgaagaaagcttaaagctgtcgtttcctttgttagggcagagttcctggataattttccgcaaccttatggttgctccggtatccgaagagttggtgtttc

SEQ ID NO: 4388 - DNA, 492 bp, Cyanidium caldarium
  Clone ID: LIB190-036-Q1-E1-H11
taccggaccgtacttcgcgggtggccccacgcgtccgccaacgcgtccgcccacgcgtccgcccacgcgtccgatcctgccatcaatggtggtgatatctacaactctcctatgatacgagagaaacaaatacttcgtttactcggaacaatgccaactttggcagcttttatttatcggcacaaggttggacgtccattcaactatccagcttatggtggaagtcgatcctataccgaaaactttatgtacatgttggatagtatggatgatccttcttatcgtccaaattcaacccttgtgaaagctttggatactttgtttgttttgcatgcggatcacgagttgaattgctctactgcggcagttcgtcatctcacaagtagtggtgtagatgtttttactgcattttctggggctgcaggtgccttatatggaccacttcatggaggagccaatgaagccgttttgcgaatgttggaaaagattggt

SEQ ID NO: 4389 - DNA, 149 bp, Cyanidium caldarium
  Clone ID: LIB190-036-Q1-E1-H3
caagccttcgaacaagcgtccggccaagcctccggccaagcgtccgggctaattccaaattgccaacgggcgctccaaaagattcaagcctaagttcgccttcaagccaagttaaaactcctccaaaatggcaaccaaaatcaatttaa

SEQ ID NO: 4390 - DNA, 446 bp, Cyanidium caldarium
  unsure at all n locations
  Clone ID: LIB190-036-Q1-E1-H7
attcncgggccgacccacgcgatccacacacacttgttccttccaaacatgtttcatttccttcttcttattagtcgtcaaggaaaggttcgtctagccaagtggttggaaccctactcccagaaagaacgaacgaaaatctcccaagagttggcttccctcttaaccgcgaggtccaataaaatgtgcaactttatagaatggagagacttgaaagttgtttataagagatatgcaagtctctttttcgttgctggagtagaccctacggataatgagctgattacgttggagataattcaccattatgtagagtgtttagacaaatatttcggaaatgtgtgtgaacttgacttgatattcaactttagcaaagcatattatatattggatgagatattattggctggagaacttgaagagtcgaaacgaggaaacgtattgcg

SEQ ID NO: 4391 - DNA, 480 bp, Cyanidium caldarium
  unsure at all n locations
  Clone ID: LIB190-036-Q1-E1-H9
gtacggtccgtacttcncgggtcgccccacgcgtccggaaaaagactgcgtgaggaggaatggcttgtgtggatctgcttggatgttttcgtacttttagttttgtgtcgtgtcggacaagttggatacatacaagacaaacgactctttggaatagagtgaaaaccaagtccgtgtgtcgtacttgtcgacaagtttgttccatgaccgaaaaactagcgcccctaacaacttgttggacacccaacaacgtcacatcatcggtcgaaaagtccatttcgatatccagttataatatgttggctcaagtttacgtaaatacgactcagtttccatattgtcccagaaggtaccttcgacgcaagcacagattggcccttacaaagaatctattgcaaagtttacaagtggatattctctgtttacaggaagtagattgttacaatgaaatagaaacttgtctgagagaaaaaagggtac

SEQ ID NO: 4392 - DNA, 423 bp, Cyanidium caldarium
  unsure at all n locations
  Clone ID: LIB190-037-Q1-E1-A10
gggccgagccacgcgtccagcaaaactgctagaatgcgtgaaattggaacttgcgctacctttttatggaggagtactttttacgcaagttgaaaatatcaagagaggtcattttattctagataaggcagagtgtaactcttatatggacctggaccaggatgacttttggaaacctcggtttacagcttgtacaacgaggagaattgcttggtctttcgtagcatagctcagttttaaagcacttttgaggtccgctcttgtatatgcctttcgatatgtacttttcactattgctttgggtanacactggacggttatcgattcaagaggcagttggcaagcttttgtcattgttttgaaagttgtcaccttatatcaaaacgtgatagtgaaaccaagactaagcgtacattcaaacac

SEQ ID NO: 4393 - DNA, 399 bp, Cyanidium caldarium
  unsure at all n locations
  Clone ID: LIB190-037-Q1-E1-A12
acgcgtccaggtcaatccagactctatggaagaggaagttgatcccgttcccatgttgacgaggaagcactttgaagagagtatgaagtttgcaagacgttccgtaaccgatgcggatgtgcgtcgctatgagatgtacgcgcaaaacatccaagctacgagaggattcggtggtggattcaagttttccgatacaccttcctccaacaatcaaggtaacaccggtgacgaggatctctattcgtaagagaacggttcacgaatctgtgcagtttattgatgtgtggcgttttgttgaaataaaaatttgtttagtttagccaaaanaaaacgagacttgaagaaacttgcaaatgcaagaataaccaaaataaggataaattcagaaaatgaagaagc

SEQ ID NO: 4394 - DNA, 248 bp, Cyanidium caldarium
  Clone ID: LIB190-037-Q1-E1-A9
aaggtggacacgcaagtctggtcagtttgttcgaaaggaccaaccaagctcacaagacctttcagcttggaggtctatgggagaaacttattatcctgagcgaaagagtcaagaaacattagacgctgaagaacttcaacaaaggaagagcatgaataagtcgagttcggaacgaccaaaagaaaatgttgcagctgcatcatagttgagtttgtttctatcataaacttattattcaacgtgaaaaa

SEQ ID NO: 4395 - DNA, 432 bp, Cyanidium caldarium
  Clone ID: LIB190-037-Q1-E1-B10
cgcgtccagctcaatgatcgatggaagaaaagagtgaagacttgttggataaggaactcgagtccttgttgaaagaacgagatgctattttgaatggaacaagtgaagaatacttgagtcaattggcgcctttagagaatgaaaggaaacgtaaactcgatagagctatggacttttatcaacttcaactacaatatgcagaacagctgtatgagttggccaagaaagaagcatatgatagctttcaagcacaaaaggcagaacaaagagaatatatgtggcgtattaagttggaaagagaaattaccttgagactcttaagattatccattccattaagggacccaaacggacaagtgattgtaggaacctttggaatggaaggctttgtgaatcttatctatcgcaatcgtttattcgaaaattgttcta

SEQ ID NO: 4396 - DNA, 433 bp, Cyanidium caldarium
  unsure at all n locations
  Clone ID: LIB190-037-Q1-E1-B12
cgcacgcgtccatccatatcttgttgttgttgttgtgtgaatttgtagtagtagaccacanagatgaacggtgtagtatcttcagggaatatggtgtataacacgcttggaaaaagcggcttattagtatctaaactatcttttggctcctgggtcacttttaacgaacaagtggacgtcgaactggcttacagcttgatgaaaagagcatatgaactgggttgcaatttatttgataacgctgaaacttatgcagctggagcagcagagtctatcatgggagaggcttttcatcgaggtgtaaagganggcgtatggacaagagaagacttggtgttgactacgaaaatattcttcggcggaagaagttcacgggatacccacacctccaaaggttgttcaaggaagcatattgtggaaggactgcaagcct

SEQ ID NO: 4397 - DNA, 391 bp, Cyanidium caldarium
  unsure at all n locations
  Clone ID: LIB190-037-Q1-E1-B2
acgcgtccagacaaagttgctgcgaaatattctgtggatagtcaatggtatcgaggagttattcgtcaaaaggattcggtgagagacaggttgttggtgcaatttgtagactatggaaatgaggaatgggttgcatatgatgaagttcgcagtttgccaattgcgacacagaatattccaactgctgcgtattgtgtgcttttgaaagatgttgttgtcncagagttgacagaagactgggggatggaagctggagaggctttgaaagatttggtttggaataagcgagttttggttcaaggcacgaagcgcattatggacacgggaaatagtcatattcctcatgttgttgcagatgtatatgtagaagaggacaagcaatcaaggaata

SEQ ID NO: 4398 - DNA, 317 bp, Cyanidium caldarium
  Clone ID: LIB190-037-Q1-E1-B4
gcgtccaccttaactctccaagaagttgttgcacggctgtcgaaagaacgtgctgtgaagtgagagaacgtacgagaaagccaagtgaggaaaagaaggcaagtagagggcggcccgagaaaggagagggcgtaagacgtgatacagagtaggaagaaaagagaagagagctagaaaggaggtaaaagaagagtaaaaggactagaagaggtacggaattcacgaagaaggagcgtgaacgaaggacgaatcccaagtaatcgatgaagaaaaagcttcggtgaaagcgtgaacggattttgtacacactgcccgtc

SEQ ID NO: 4399 - DNA, 379 bp, Cyanidium caldarium
  unsure at all n locations
  Clone ID: LIB190-037-Q1-E1-B6
ccgggtcgacccacgacgtccacccacgcgtccggtggaatgaaaaacggttgtccttgatgaaaaagtgtcaacttccggttctccctgaatacattgaatctcaaattctggaattattagagtatgtaaaggatgttgctgttgctagaatggtttgtaagcgatggaagagactcgtggatgaaaattcccaattgtggagacgacttcaaggctttacactaccaaaacgactaccaagtgaagcggaaaagtatagaaaggcagctgaatgtgggaatcgagaggcantggtgcttcttgccttgctctattattatggatatcagagtcaggatgccacagttttgtcnttgacgtttcttcgaaatagtgt

SEQ ID NO: 4400 - DNA, 390 bp, Cyanidium caldarium
  Clone ID: LIB190-037-Q1-E1-B8
aattcccgggtcgacccacgacgtccacggacgcgtgggaatttgattaggcaacaagtagagttgatgaagactgaaggagttaatttggtatttactcctgaggctattcgagaaattgctgctgttgctgccgaagtcaataccaatgtggagaatattggagctaggcgtttgtataccgtcattgaaaggattgtagaagatattagtttcaatgctccggattggaagggtcagaccgtgactatcgatgcacctagtgtgaaaggttctcttggagatatgttgttgaagacagacttgtccaagtttgtattgtgacaggaaagagaggaacgatagattgctttataaaatgtttatcgtgttgttgttacttttggaaaa

SEQ ID NO: 4401 - DNA, 379 bp, Cyanidium caldarium
  Clone ID: LIB190-037-Q1-E1-C1
ggtcgacgcacgcgtccgcccacgcgtccgagagatttgagtatgactttgctcgagatatgatggtgaaagtgaatgataagtttaaattttatgagacagtcgacctcaatcgatttgtcgacagaactgcagctcaggaacaaaatatcgacgtagaaaacgacgactatgtttatgttttacattctgttctagttcatgtgggagatgttcatggcggacattattatgcatttattcgtccgaaacctttgtcggatccctccgtttggttcaagtttgatgatgaaacagtcttaagggcagataagacacaagccgtcgatgataactttggtgttggtggtgatgaagatgagtcaccagaaaggaaaat

SEQ ID NO: 4402 - DNA, 424 bp, Cyanidium caldarium
  Clone ID: LIB190-037-Q1-E1-C10
gcgtccaagaggaggaagcgaggatggaagatttctatcgagtgaagcgagtaaagtataaagataggaacactgctatttgcttacaaaatgaaaacggaccttgtcctttactagcaatagtcaactgtttgttgttgagagcgagcatcgatatccacgccgatatttcttacatatcttatcaacagttggcagagcttttaacggattatttatttcagacacaaagtagtgcggcacaggaccccaacttggaacaaatagttttggacgtcgttggtgttatcccgaggttgagaacaggtatcgacgtgaatataaggtttcgtagttgtgactcttttgaatatactgttgagttggctgcatttgatgcttttcgagtgcgtttgttacatggttggataattgacccaaacga

SEQ ID NO: 4403 - DNA, 321 bp, Cyanidium caldarium
  Clone ID: LIB190-037-Q1-E1-C11
gcacgcgtccagttgggccttgtggtggtgatgccctggattgagctacgtaatggcaactccgctgtcttgaaagacataactgcaagtattgaaaagcctgacataaaatggataactaggacgaatctcagtacttgtctgaattctgcagaaggaaatgttacggttgacttgtcgcggcagtgtagcttgaaggatatattttcattgaagcttctcgacaataactttaagttggcgtgttttaatgatgccttgtttttagttttaacaggcttatcctttgttattactggtaatcgtatattctgtagacgc

SEQ ID NO: 4404 - DNA, 430 bp, Cyanidium caldarium
  unsure at all n locations
  Clone ID: LIB190-037-Q1-E1-C12
gacgcacgcgtccacggacacgtggggaaattttaaatagccaacctccaggtgatgtgaggtgtaatcatcatcgaaaagtgaaacgagttggcaatgagtgagttggtgcgacctggtcgtttctttgatagcggctttggtgacttattttcttggacgaatgaccccttcttccgtgatgcatggaacttgatacctcgagtaggtggagctgagtctcagttatggtcgccgagaatcgacctcattgaaaaagaagacgcgtttctggtgaaagctgaggtacctggagtaccgagagaaaacattaaagttgacttgaaaggggatatcttgagtgtgtctggagaaaaagctgacgaaaaaaagtcggatgaagaacgagaaggaacggtattccatangatggagagaagctacggaaaat

SEQ ID NO: 4405 - DNA, 301 bp, Cyanidium caldarium
  unsure at all n locations
  Clone ID: LIB190-037-Q1-E1-C2
gcgtccaccggtatttaacaatttctcaaaatatacagaaaatacttgtggcttcccgtgttctctgttgtcttctttacgcgatggtggacaacaacaaaatagtttcaaccaatttttagcatcctccccctctgagagtgtggctccttcttttggacttcctcgtcttatagctccgtccatctcggaagatggcattacactttatttganatatgctttgggtggagcaatctgttgttgcgttactcactcctcaactgttcctattgacgtgttgaagacacgtttacagaca

SEQ ID NO: 4406 - DNA, 383 bp, Cyanidium caldarium
  unsure at all n locations
  Clone ID: LIB190-037-Q1-E1-D1
gggtcgacgcccgcgtccactcggacaacgcagagcttaggccaagttttcctgtgccaagcttggagaatcctgctaagaaaaagttaaattcgtcaggaagctaccttgtgattggaggttgtttggcaaccgccgctgtattgtttggtggtttgataagttttcgccgtgggaactctcgcaactctcaaatgtttatgcgtgctcgtgttctgacacaaggtgcaaccttggttgcggtagcaggtactttctggagtgcagcaaatatgaaaaggaaggagagggagcaggcagaagcagccggcgaagagttgggagtagaaaccttggatcaagacaaggcgaaggctctcctagaanagaccggtcgacagaaa

SEQ ID NO: 4407 - DNA, 403 bp, Cyanidium caldarium
  Clone ID: LIB190-037-Q1-E1-D11
attcacgggtcgacgcacgcgtccaagtttctttgagaagtcattatgagccttctgtacagaatgccatcgattttgttacctcgcagggtagaatgaaatatgttcgtcctatttacaaggatctttactatatctatcctcgaggggatttggcgctgaagacattttcagaaaaccgccatcgttatcatagtattgcagcaaagttgattgcgagggacttggagttgatagaaaattgattgctttttatgtacaacaacaagcagggtctcttgttatgtcttggtttgtttgtgttgtagtgtctgaatatgcaagtggatgcccgtaaacaactattgacatatatatatacatatatatatgtatatatagaaagatagatatcgatatacat

SEQ ID NO: 4408 - DNA, 401 bp, Cyanidium caldarium
  Clone ID: LIB190-037-Q1-E1-D3
gcgtccaagcgtaactccgtttcctggaaagcctttgggtttacgttgctgtaatattcaacaaaagaaatactggataaaacaaagatacaataatatagtagtatttcaagtaatatgtgcagctaattcgaaacagtctttgtaccgaattcgtcccttgcaacgacaagtaagtaagaaagtgtctgtgtattcttctcttgtctcctccaaccaacacaataacaacaacaacaatcttcgattctctctctaggaaatagttgagtttacaaatatttgcaaccaatgttttcatacacatcctccatggaagttgttactgcgacccatattctttttggaaacatttcttggtctaatgttgttgatgaatagaaaagaatcgcaagatgact

SEQ ID NO: 4409 - DNA, 330 bp, Cyanidium caldarium
  Clone ID: LIB190-037-Q1-E1-D4
gcgtccaaacaaaaggaaggaaacaggtggaatcgcgtcattacttttctcgttttatgtgtcgaccaccctcaattggatattcgcaagtctgctgtaaagtgtttagcagaaatacaaatgcatattggagaatggaatcctacgaatcctttattgagcaatacgcagcgaaaatggatagaaatgtatatccaaatatctcaacagcaacattcgacataatgcaacaagtccgtcgtacggttgtggtaagagatgccgttggtagagaacacttgttgtattccattagtaaagaaagatggttattattagaatgaaacgaag

SEQ ID NO: 4410 - DNA, 462 bp, Cyanidium caldarium
  Clone ID: LIB190-037-Q1-E1-D7
gtaacggtccagaattcccgggccgacccacgcgtccacccacgcgtccgcccacgcgtccgcccacgcgtccgcgttcagcactacgtagactccaaaggtgtttcttattacgggtttgaagcctggtggaagtgggtagctgatggttgtccacctcgtccttccaaagaggaagtcgctaaaaggacacgccagtctggtcagtttgttcgaaaggaccaaccaagctcacaagacctttcagcttggaggtctatgggagaaacttattatcctgagcgaaagagtcaagaaacattagacgctgaagaacttcaacaaaggaagagcatgaataagtcgagttcggaacgaccaaaagaaaatgttgcagctgcatcatagttgagtttgtttctatcataaacttattattcaacgtggcgtactttgttacgttgttccactttgtgtggtttt

SEQ ID NO: 4411 - DNA, 375 bp, Cyanidium caldarium
  Clone ID: LIB190-037-Q1-E1-D9
gcgtccactttaaaacaaaagcagaagaacaacacaagagattttctaaggcattcgatattgaaagagttcgtcgaataactacgataggagaactcgatgactattatatatccaaagtttttggctttcatggaaaggaagattattataggaagaatggaagtgaattcttcttaccttttgtcagagttcctttgcttattcttcagtcgaagaatgatcctatcgttgatacagaacatgtaccacaaatacctaaatctctacctattcatttattttatactgagaatggtggacactgcggctatttccaaggattcttttctccatcttatatggcgcaagaaatgtcccgttttttgggttgga

SEQ ID NO: 4412 - DNA, 280 bp, Cyanidium caldarium
  Clone ID: LIB190-037-Q1-E1-E10
gcgtccacccacacgtccgcccacgcgtccgagaattcgaaccagtactcatgaggggacatataattttgatagtaataataattcctaagtatttttctttcgtattggtttgtcatataaacaataagaacaacgaaaaataaaaaaaataaagaaaaaaaaaaaaaaaaaaaaaaaaaaaagaaaagaaaaacgggcagccgctctaaaagatgcatgcttacgtgagcatgcaagaaaagtcatctgccttatatactgtcaactaaattaaatt

SEQ ID NO: 4413 - DNA, 214 bp, Cyanidium caldarium
  unsure at all n locations
  Clone ID: LIB190-037-Q1-E1-E12
cgcgtccataactgatgaaaatgcagtaaactagcagtaggacggaaagaccccataattcttgactagataggtttanggangagagagaatcatgaagtanaggaggtggggtaagagatgaaagacactgcatgaggataaggaatctaactgagtaaggaaaataagcttaagctaatttggctggggaagtaaagcctaagaaagagta

SEQ ID NO: 4414 - DNA, 450 bp, Cyanidium caldarium
  Clone ID: LIB190-037-Q1-E1-E6
ttcccgggccgacccacgcgtccatattgattgaaccaacttctggcaataccggaatagcgttggcgtttattgctgcctctcgtgggtattctctcatcttgactatgcccgagtccatgtcgatcgaacgtcggatgatacttttagcgtttggagcccaagttgtactaactcctgcttccaaaggtatgaaaggagcagttttgaaagcagaagaactcttgaaaaccacacctaatgcatacatgttgcaacaattttccaatccagccaatcccaagattcactatgaaaccacgggaccggagattgttgcagctggaggttgcgatgtatttgtttcaggagttggcacaggaggtactattactggtacagggagatatttaaaggagaagaatccatcggtccatattgtggcagtagaaccgaccgaatcccctgttt

SEQ ID NO: 4415 - DNA, 421 bp, Cyanidium caldarium
  Clone ID: LIB190-037-Q1-E1-F1
cggtcaagaattaccgggtcgacgcacgcgtccacccacgacgtccgcttgttttggctttggtagtgatctattatgctttgcttggccttccattggcgtgtttctgtcttattatgtgctgtttaccattatttatcaggttacttcttccttatgcggagagcacacaacgtagacgtggcagagcggcaactttagaacaaatcaacagtcttccatgttccagttatgttcatggctcctttgagagagaagaagatacgagttgtgtgatttgtcttacggactatattgacggcgacatgattcgtcacttaccttgcaagcatcattatcataagaaatgtatcgatgaatggctagcattggacaagtcttgtcctctttgtaaaaaggatattgattgtcgtgaagatat

SEQ ID NO: 4416 - DNA, 439 bp, Cyanidium caldarium
  Clone ID: LIB190-037-Q1-E1-F12
acgcacgcgtccacccacgagtccgtgaaataatgcagatatttgtaaagacacttacaggcaagactataactcttgaagtggagccttcagatactattgagaacgtcaagtccaagatacaagacaaggaaggaattcctccagaccagcaacgtttgatatttgctggaaagcaactagaagatggtcgtactctttcagactataatattcaaaaggagtctacccttcacttggtattgcgtttgaggggtggaatgcagatatttgtgaagacacttacaggcaagactataactcttgaagtggagccttcagatactattgagaacgtcaagtccaagatacaagacaaggaaggaattcctccagaccagcaacgtttgatatttgctggaaagcaactagaagatggtcgtactctttcagactataa

SEQ ID NO: 4417 - DNA, 449 bp, Cyanidium caldarium
  Clone ID: LIB190-037-Q1-E1-F3
gggtcgacgcacgcgtccactgttgcttgggtactgaatggcgagatatatgaacttcatgttcgtaattatggaatggcatggggagcttttcttctcttgggttctgcagcatcttcaacgacttctttttccaagcaagtttcagccctaactttgcagggaactttctatttttatgtcggagtatcattgctgtttctaatattccatttgatatttttacctgaaactaaaggaatgttacttgaagatgtgagagagctctttaacgatggcatgttgggattggcacggagaaacttgagcaatattcaaaattccattttgcataagtttcctactctttggaagagaaatgaatcatgaatttatttttaaaatatatgcttgccctttgttctagtgcttttgttgacctttgcttgataataaaacagagtgaatgc

SEQ ID NO: 4418 - DNA, 170 bp, Cyanidium caldarium
  Clone ID: LIB190-037-Q1-E1-F6
actgttctagaggtcaacgtaatcctatgtttcttccaaaagagacatcaactcctagccgaggatgatgaaggatgtccccaagttcggagaaggaagtagaaagaagagagtgtaaggcggcgtcataatagaaatccgaaaggagtagaagaaaagagagagaaaaa

SEQ ID NO: 4419 - DNA, 374 bp, Cyanidium caldarium
  Clone ID: LIB190-037-Q1-E1-F8
ttcccgggccgacccacacgtcaagctattgtgtccctcactacgaggtttggttttctgttgtggtgaagactttgtttagcaacttgtgtgcaaaaaatggtcaacttgttgtatactgatgagggacgaaacctgttaaagggctaccaactcattttatatgttgctatgttggctttctccgccactattttggggcttatggggaatcccatgtttaatctctatctaattgccaatgaatatagacacccggatcctagcgaaccttttgtacccattgacaaagtgaagaacgtcactttctacaagtctctctccttctgtgcctggggtgtcacaggagatcgtacgcgtggcatgcattccac

SEQ ID NO: 4420 - DNA, 297 bp, Cyanidium caldarium
  Clone ID: LIB190-037-Q1-E1-F9
gcacgcgtccaactagatctactgccgtcgaaccgcctcatatggagcacttgtgcaactttttgttccagaatagagtaatttccatgtttactgggatagagcgtatctttgctccatatgcagaactagaatatgtcctcgttcgtactgaatgggcaataacagtagtgtttcgcgcaatatcattattggtgcacaagtcagcttaatcattgccatacaatgacgtgcttgaagaagattctacgtggtcactttgttcctatgagtaaatttgagtagtaaatttttcct

SEQ ID NO: 4421 - DNA, 433 bp, Cyanidium caldarium
  unsure at all n locations
  Clone ID: LIB190-037-Q1-E1-G11
acgcgtccgaaattttatccaaatatccctttgcgaaaaacatgttttccgccaacccaacaaaaattattgcacaatttacaaaaagcatttggtaaccaacattaaagtataaaagtcctttgcacctgagtanagcagagatatggagagcttcttatccaattggaagcagacgttcctttgcagaacaaaaggcacagcagcagtccaaagaaggtgaagaaccaataacgccttatcaacctgtgacggagaagctggataaaagagacccaaactatccttggaagtggagaagttntcttcctgaacatacctacaaacccaaactcaatatcaatctggaaaggcatcatacacctttagattttagagataaggtagccccgggaatcctcaagtttttaagaatttttgcggatgccttttt

SEQ ID NO: 4422 - DNA, 364 bp, Cyanidium caldarium
  Clone ID: LIB190-037-Q1-E1-G2
gcgtccaatgagattcacctgtatgaatattacaattccaccttacaacagtccacagatcatcaagatttgggcagtattcataagcattttgggctttttgttgcttttatccttttcttccatgttttactggatgcgaaaaaatgctcctcgaacggacttatagatgcttatcgatggagctttccgcggtgtaatgactttgaataataaagttgggttgcttccatttaaaaaaaaaaaaaagaaacaataaaaattaactaatacatccttgtcagtaatcatgaatacaacaaataaaattgcgagaaatacaaagaagtcttaaaagaaaataaaaaaaaaaaggggggccccc

SEQ ID NO: 4423 - DNA, 435 bp, Cyanidium caldarium
  unsure at all n locations
  Clone ID: LIB190-037-Q1-E1-G3
gcgtccgcccacacgtccgcccacgcgtccggatttttccgtcgtgagggacgagtatgagttttcaagtcaagcgtttggcgacgcgagtcaaaaacccgacatgtctgttttctcttgtgctccattgcttggtgcaagacttgaagagcagccatatcccaacaaagctcttgaaggacctttcaagagcctccagcccgacttctatcccgagtctgagaaaaagcgcgtcttttgttataatgagcaatactcctcatctttacctgagaacctgcatagttggagtttgagggcacgttgtagcagcgatgatagttgcgatagagagattgagagaggtttaaagtggacggagaaatctacttgccttggaactttgcaagagcgcgtaaaggctctannaagaagaaactacaggttgaatatgca

SEQ ID NO: 4424 - DNA, 141 bp, Cyanidium caldarium
  Clone ID: LIB190-037-Q1-E1-G5
gtaaaggtccagaattcccgggccgacccacgcgtccagaaactcccaaagataagttggatacgagtcaagtgactccagaagggaaatatcacaaccacgacagtccttgagaaataaatcgacactcgtgtgagattt

SEQ ID NO: 4425 - DNA, 428 bp, Cyanidium caldarium
  Clone ID: LIB190-037-Q1-E1-G8
ccgggccgacccacgcgtcagtaggattagaacaagtggatacgctatcgaatagtttacgtaattcggcggttatttccaaggatgaatttcatggagtacctgccacgttttccaaggaagatatgagtactttaggtggaaatagttgtttactcatggagacgaataacaacagtgcaaagtggctgacgagtagcaagatgttgtcatcggaatcggattgcctaacaactagtacgacgacaactcgtggagaaagtcctgtgaagaagacatcgaataattatacgacttggacgagttatgaaattcctggagtttcgtttggagatgacttgggtcccgactgggtattatctctttctaattcttccttgacagccaatcctccggatgctgcaggaaacaactctttatataatcac

SEQ ID NO: 4426 - DNA, 288 bp, Cyanidium caldarium
  Clone ID: LIB190-037-Q1-E1-H1
gggtcgacgcacgcgtccgcccacgcgtccggctggtcgttttccacccgatgaaactagaaacattatggaaatggcgtatcaacgaatatttggaaactattacatattcgaagctgagaaagaagaattgaagaccattgactctgctttccagaatggaagataccgcgtcaaggactatgttcgagctctgagcaagtccgatgtgttcaagaacaagtttttctataatcgcccaatccaaaactccaaccaagttgtgtttccgtaagaaaatgggaaagg

SEQ ID NO: 4427 - DNA, 364 bp, Cyanidium caldarium
  Clone ID: LIB190-037-Q1-E1-H11
acgcgtccagcattattatttacgtggcagtgattgcactaactactttgactaccgttggttcggggatggcttatatatatcacgtattttggaacaaacaaggaaatgtatttcaacatgtcacaatgataagacgacaacgcaatcgaccgaaatgtttctaaatcctcaacacaagtgtttccaaacaggaaattcgccttctgataagcttacctgatgaacgcgtatgcctaatcatcataaaaccttgatactggtacgcaacctatataataaaatatatcatcataatcgagtaaaagtactgttgcgagagacgtgtccggacaaaaaatatagaaaaacgaatttttggaaa

SEQ ID NO: 4428 - DNA, 407 bp, Cyanidium caldarium
  unsure at all n locations
  Clone ID: LIB190-037-Q1-E1-H3
cggtcaagaattaccgggtcgacgcacgcgtccactcaccaaaaaagatgtggaacattgtttcgatgtgatatggtttagcatatttgatatccaatattcttgtttatgttctttgaatgccttgaaccagatgtgtcgaacctacagcgtgtctgtgccggctggcgatgactttgaatttccaaactctccttgcttaagtgactgggatctcgttcattttgtttcccatagcaacgaacctgtatttcgtgtatttcacaagtgcatcatgtgctgctttttagaacaaagaatagttgtctttcgggatggcctttgtatactgaaaaattccaacagctggttgttgttggatgctttgcgtgatatcacanaacatgaaaaggacanagaaaacccgt

SEQ ID NO: 4429 - DNA, 423 bp, Cyanidium caldarium
  Clone ID: LIB190-037-Q1-E1-H4
ccgggtctgacccacgcgtccacgtatagctgctgttttcaatgcagctttgacatttgcagattgaaatctcctagcatgaaggttctaagaccaacgaaggacagtgtcctatggaagaagctagcaataataatactgatttagagcaaactattttttcaacgggaaaggacacagttggggcaaacagcgatcatattcggctacatgaagactccaactatttttattggaaaggttactggtacggatattttctatcccagtggtatctttggattggagaaagtcctcctcctgtcgaacacgcaatgcagcagtacaaagaatattcacaagtccaactccaggataagtagattagaaaatggtcttttgttttctcaatgcagccagcactcttggtaggtccgtttgttc

SEQ ID NO: 4430 - DNA, 433 bp, Cyanidium caldarium
  unsure at all n locations
  Clone ID: LIB190-037-Q1-E1-H5
ttccgggtcgacccacgacgtccacccacgcgtccgcccacgcgtccgaacgacagttgtcttgtcctacttgtagagctcccgtagatctctcaagtgataatccaagtggaacaagtgttggtgcaaatgttgttggagagcaaggacaagtgcaaaacccagtagaaaggagacagatggaaaatggaattgccaatcctccaagaggacgtacattaagagttggtttgcgtgtcaatattggaaacaggactgcagagtggaatcctttccaagaggacctgtttcagacattgcacgaagcaagtcattctactttgatgcatttcagtccctgtcctcgtcctcctcctttcgagnatttagtatgaaatgaacaacagtcgggttggaacagcgtccttagtaataacagtaataataatacgat

SEQ ID NO: 4431 - DNA, 422 bp, Cyanidium caldarium
  Clone ID: LIB190-037-Q1-E1-H9
tgacggtctagaattaccgggtcgacgcacgcgtccaggggcagaacagtttggtgcagtattgccagcgccagtagaagaaacaaaagtgtccaaactctttggactctgctttgctttctatctagaatggcagtggaaatgaaatcgggagtggcaagttaccctttttctgtcggtagagagtgacaagggttcgccacccagacagcatgttttggcacttggcgccacaaaacgaaactgactagggcaaaacactgaatgtgatttgataaagagtaagcgtgcgtgacactggcagagtggcaaccgcaggttcgtctgttacatagccagctgtcgtgtccttatctcttgcgagattagctccggtaggacgacgctacaaagccaacttgcaatcctcgagacgctttgtc

SEQ ID NO: 4432 - DNA, 352 bp, Cyanidium caldarium
  Clone ID: LIB190-038-Q1-E1-A11
tgtccgtgtctcggagacatttaagaagagatcaatcaaagttatccccaatacaagatgaggtacaaacaatggcggtcctaacggtaaggatccaaaggtagcgaagtaaatagacgtttgaaaggcgtccagtatgaaaggagaaacgagtgtagcactgtctagtcgtccaactcagcgaaacagcaataactgtgaaaatgcagtaaactagcagtaggacggaaagaccccataattcttgactagataggtttagggaggagagagaatcatgaagtagaggaagtggggtaagagatgaaagaccactgcatgaggataaggaatctaactgagtaaggaaaat

SEQ ID NO: 4433 - DNA, 422 bp, Cyanidium caldarium
  Clone ID: LIB190-038-Q1-E1-A12
cgtccgagattggacaaaacaagggtggtagtggtggtgaggaaaaagccggttacaagacacacacgagtttctcgtggtatgggtgaaaagtatttagagcaagtgtggatattcatacgacaataaatcaaccttgtgtccggtgagaaactgtgctacgggatgaacaatagtgtggttgcgggacagagtcacgagtcgagtgggtacttgaaccaagtattacaagcactcgatgaagcaaagaagcaagcaatagaacaattacaacaacgagcagaagaaattagagaatggtctacggtgacaaccaagaatacggtggatgcgttgttggaagagtccaagtatatagcgtctttgcaaaggcagaggagcaagaagaataactactacgaaaagattacgctgggtttgat

SEQ ID NO: 4434 - DNA, 342 bp, Cyanidium caldarium
  Clone ID: LIB190-038-Q1-E1-A2
ggtctagaattcacgggtcgacgcacgcgtccgaattgactgaaaaatttttcgcgcgttgtatccatcgttgtgctcttagcttcgcgactcgtcgattcttttgtgtgtgattgggttatccgaatcgcctttgtaaacgcttgttgatcagagagaagtaggaatgttggacccggagactcatgaaagatctgtttaattatcatgattagctgagcatgcagagcgttatgatgacatgatacaacaaattacaaagaatgcatcagacgccaacgataaagtagcggaacttactgtaaatgaacggaatcatcattcactggcatatatgaatgt

SEQ ID NO: 4435 - DNA, 322 bp, Cyanidium caldarium
  Clone ID: LIB190-038-Q1-E1-A4
acgcgtccgcagtaaaagaagaaagagaaaggaaaaaactgagtatcaggaagaaaagagggagtagatgaggaaagaaagatcaaggaagtaagagtaagagaaggagtaatgtgaatgaaagcaggaaagtatttgaagaagagagtgtaaagcgcgtaccttttgcataatgtcccagcgagtgaaagaggaagcaaaaagaaagaaaaagaagtagccaggtaagacccgaagctagttgatcttatgctgtccaagcgaagtaaggctgaaccagtatctgtggaaaaagatttggaagagatggcataaggggtga

SEQ ID NO: 4436 - DNA, 450 bp, Cyanidium caldarium
  Clone ID: LIB190-038-Q1-E1-A5
gggccgacccacgcgtccacgtgtgggtgtgctcagtcagaactgcttctcagttagttacgcaatatgcctagtcataaggaacaaaataaaggaattaaaatatcagctgacggttacgcactaaagttgagcggtattcggttggacgtagacggcagtttggtcactatggtggacgcagacgacctcagagccctcatgtttaaggaaagcctcaaggaaaagtcaaagctgcatgacccaaaatttttcaaaagctattatgaggagaataaggactacttttattatatgactcatacggagaagaaaatgtttctttctctggaagttgcacgagaatacgctactctggtgggaaactcgtttctgcagaaatatttggacaaagtcattgagcacgaacacgcatactaagggaaacaacgttgttgctgatagtttgcg

SEQ ID NO: 4437 - DNA, 239 bp, Cyanidium caldarium
  Clone ID: LIB190-038-Q1-E1-A7
gtccgggtcgacccacacgtccaggaaaggtcatggaaagaagttggtaaacaaatgaggacacgtataacagaacacaagaaaggaaaacgtattctaaatcaaaaattgaaagctttgttcggtgagtcgttgtattttccaacctttttccaaggattgctgcaggtgaaaaatgatattttaaggcgttctctttccgaggagccataatataccttctaaaggttttatagttg

SEQ ID NO: 4438 - DNA, 322 bp, Cyanidium caldarium
  Clone ID: LIB190-038-Q1-E1-B1
gcgtccgaatggaaggacacccaaatgttcgaagtggttatagtaaaaaccagtgccgacatcaacgctggaatctgtgtagcaggcatccaccatgggacctggatgtagtcgatccagtataaatctgcatgtggggaaggattgggcactgatacaaggaagtatgggacaatattcaggaatggcgtaaacaaggcaagaaataaaaggaaggaatacacggtagttgtggcaagaacacatacgaactgcaacggtttaagatctcgtgtaatcgatgcactaaaaaactgagtgattaagtcgaataggagtcatt

SEQ ID NO: 4439 - DNA, 427 bp, Cyanidium caldarium
  unsure at all n locations
  Clone ID: LIB190-038-Q1-E1-B3
gggtcgagcacgcgtccggcattatggaatgaaacatttcaaatgattttgctgtggtggaaaaccagaaacgagtagtttctacatccgttgtgttgtctcttgtgtccactggaaatggagatgattgcaaatcctttggaatacaacgacaaaggagatatctaaactgtangggggttttctacagaaacagagggtaactcgagtgtcttcattgatagaaaagattcccagaatgtcgacggcgtttagagacagaatgagaaagctatccgcaacaaccttgtatacaggaagctccctatgatatccgtgaggaggccatggcagacttgaaaatactcgtcgaatattcaaaatgaaaaaagaatcganaaactctacggaaagcattgttattcgttcaagacatgaagaacaaaag

SEQ ID NO: 4440 - DNA, 462 bp, Cyanidium caldarium
  Clone ID: LIB190-038-Q1-E1-B7
gtataggtctagaattcccgggtcgacccacgacgtccacccacgcgtccgaaccaatgaacgaagtgtggataatagaactagatggttcaagtcaaaatctaaaaacgctcgttctacttggaacgggaaggtacaacttccaaaaccatggaaagcggaaccaccttttgggccgttgacagaaacagagttgaaaagaatgagagaagaattctgggatacgagagtggaaggaaggcaagaaatgtggcaagcgttgaaagcagcagcagaaaccaacgacgaaacgttgcgaaatgaaattgtaaaggcagctggattgactcctgccaatgaacgaagaacgttggaatcttgttacgatgaactaggcaactactatgaggtaccggtgtattgtttgagggaccccgataacttggttcgattggaagaagaggaagacaacaagaacaagtc

SEQ ID NO: 4441 - DNA, 458 bp, Cyanidium caldarium
  unsure at all n locations
  Clone ID: LIB190-038-Q1-E1-B8
aattcccgggtcgacccacgacgtccaaaagtgtagaaagaaagagtcgaaaggctttttttttcgtggttcgatgggtggattgtgcaatattttttgacaatgaaaaaaatattgtacatctactgaaatgtaagaacatgaggaagaaagaggcaaatacgggaaagcagtaaaagaagaaagagaaaggaaaaaactgagtatcaggaagaaaagagggagtagatgaggaaagaaagatcaaggaagtaagagtaagagaaggagtaatgtgaatgaaagcaggaaagtatttgaagaagagagtgtaaagcgcgtaccttttgcataatgtcncagcgagtgaaagaggaagcaaaaaganagaaaaagaagtagccaggtaaagaccgaagctagttgatcttatgctgtccaagcgaagtaaggctgnaacagtatctgtggaaaaagat

SEQ ID NO: 4442 - DNA, 359 bp, Cyanidium caldarium
  Clone ID: LIB190-038-Q1-E1-C1
ggtccagaattaccgggtcgacgcacgcgtccgattatacgtcatcgcatccatctggctatgttgccagttgaagttaagcctaaggatggttctttacgttctcaaaggcatctttaatttataataacatatacatgcgtggacaattcttctgcgatttcacacacggaatcttctcatctatcatgataaggtgacggtcaactcactcctccgatatcaccacacgatgcaagataatactttggttctaacaagttaatgtccagttagataacatatcaagcatgtccattgacacctcgatctcagttcaaagatcctaagttacagttgggtcctataggttcttctgt

SEQ ID NO: 4443 - DNA, 445 bp, Cyanidium caldarium
  unsure at all n locations
  Clone ID: LIB190-038-Q1-E1-C2
gggtcgacgcacgcgtccgatggccacttggcgcattcgttgtttccgctctccaaccaaagtcaccttgtcgttgtggcttgaaatattccacttgtaagaaaccttatcgtatagatattttacgaatatccaaacctagttgtttgaataaactagaccttcgagcttctcagcaaaaaaaggactcaaagaactccaagttattggctttcgaaacgaatggagatgttctcaagtttggagtcttggttactagtagttgccttttttgttattggttcctattacaagtatttcgagtatctgaacaaacagctggactggtgactactggattgttaactatctttggaatgggactttggacttttccgtattttctcgcgttgctaatanagagatgacatatgtgcaacagttgagagagtatgaagacaaagtt

SEQ ID NO: 4444 - DNA, 431 bp, Cyanidium caldarium
  Clone ID: LIB190-038-Q1-E1-C4
ggtcgacgcacgcgtccgacgtcatattatgatgcctaatagagttgaagttgtcgtggatgcaatttttatcgaaagtactgaagtggacaaggcagagcctggagataatgttcgacttcgaatcaagggaatggaagaagaagatattcggatgggatttgtattgtgtgacaccgatgctttggttcaaggcactacgttatttgatgcacaaattatgcttttggactataaaaatattatttgtgctggatacagttgtgtcatgcatgtacatgcagcagtcgaggaatgcacgattgaaaagttgctggcacaagttgatcggaaaacgaaccaagtgatacaaaagccgacaaaattcttaaaaccaggaatggcagcgatcgctcgcatatctgtagcgcagccaatttgtatcttacctt

SEQ ID NO: 4445 - DNA, 452 bp, Cyanidium caldarium
  Clone ID: LIB190-038-Q1-E1-C5
ccgggtcgacccacgacgtccaattttgaatcgatcttgtccaagtgagaatggcggcaaagaatgaaaactcttgttgtatgcttttgcaagtgaagagactaagcaaggacgctgttgtacctcaaagaggttcgaaacttgctgcaggttatgacatttgttcctcggaagactgtattgtaccagctcgaagtcggtactgtgttaaaactgacttggcagtggcgattccctcgggacactatggaagaatagcacccagatcaggacttgccttaaagcatggaatcgacgtaggagctggtgttatagatgaggactatcgaggaagcctcggtattattttatttaatcattcccgaagaaggatttcatatatccaaaggaaatcgaatagctcaacttatcctagagagaatatctactcccgaagttgttgaagtggataa

SEQ ID NO: 4446 - DNA, 464 bp, Cyanidium caldarium
  unsure at all n locations
  Clone ID: LIB190-038-Q1-E1-C6
caggtataggtctagaagtcccgggtcgacccacgacgtccacccacgcgtccggagatatttttattgtgttgcaaaccacatcatgtcacaacaaccgtcttctgcacttcgagtcgttgtattcagtaccaaagactatgatcaaagtggattgacagaagcacttgaacgtgttcctaatgctgctcctataaagtttcggttcttatcgtccaggttgtctgcaaatacagctgagcttgccaaagatgcagacgctgtttgtgtttttgtcaatgatactgtgaacaaggaagtattgaagatacttcacgacagaggagttggtttgatagctttgcgttgtgcaggcttcaataatgtcgatttaaaggcagcttccgagttgaaaattcctgtggttcgnagtactgcctattctcctaatgcagttggagagtttgttgctgcacagttactta

SEQ ID NO: 4447 - DNA, 434 bp, Cyanidium caldarium
  Clone ID: LIB190-038-Q1-E1-C7
attcccgggccgacccacgacgtccagttgctcgaagaacgaagaaatttaggcaatggaaaatggctggattgggctactgccgaagccttagcttttgcttctttgctggatgaaggttatcgcgttcgtttaagtggtcaagatagtgagcgcggtactttttctcaacgtcatgccgtctgggtcgatcaagaaaaggagactcgttattatcctttccaagttattcatggcaaagatccaagtgtctacaattcgcacttgtcagaaaatgcggtgttaggtttcgaatggggttattccttggaaacacctcagactttggtgatatgggaagctcaatttggagactttgcaaatgctgcacaagttatgatcgattgttttctatcttgtagcgaaaggaaatggagaaaacaaagtggtttggt

SEQ ID NO: 4448 - DNA, 258 bp, Cyanidium caldarium
  Clone ID: LIB190-038-Q1-E1-D1
ggtctagaattaccgggtcgacgcacgcgtccgaccacacgtccgtgtgtgtgaagagtgaatgggaataagctgactaccaagtagaatagagggactacatgaggaggtgcagatcaaggaagtaagagtaagagaaggagtaatgtgaatgaaagcaggaaagtatttgaagaagagagtgtaaagcgcgtaccttttgcataatgtcccagcgagtgaaagaggaagcaaaacacaaaacaaaaaaacactatc

SEQ ID NO: 4449 - DNA, 453 bp, Cyanidium caldarium
  unsure at all n locations
  Clone ID: LIB190-038-Q1-E1-D3
gggtcgacgcacgcgtccgacatcgaggcatccattttcacatttgtgtttgttgaagagcagcatgatgaagagcgctatgaagttctttgtatttagcattattttggcaaatgttgttcttactattcaagcagcaacggttttggagactttggagtcactgaaatatacagagtatcttgacatggtaaaggctgcaggcctggactcgaagttcaacgactctgctgttacatggactgtttttgcagcaaacaatactggagtcaatgccaccttggcaccaaagcacttggttatttctaatatcacatctaatgcgacggagagcaaagacattgtggaatatactttgtacaaccatactcttttgtcagatgatattaagacaggaacaactatccttaacgccgtanacggaatgaatttgactgtggttaagaatacgac

SEQ ID NO: 4450 - DNA, 342 bp, Cyanidium caldarium
  Clone ID: LIB190-038-Q1-E1-D6
ccgggtcgacccacgacgtccgaacgcgcgtccgcaagaaagtaagtgtagaacacattgcatttgccgtatgttttgccgagtgtcacaggaagtgaaagaggaggcaaagagatagccaggtaagtcccgaggttagatgctcttctactgtctattatactgtccgctcgacctatagctgtggcagtagctgtggaaaaggatgtggaaggggtggcatgccgggcgaaacgccagacagctggaatgctacctgggccacctcgatagcgttagcagtagcgtatgcaggaaaggagaaggtagaagaagcaaaggaggactcagagcgggactgtg

SEQ ID NO: 4451 - DNA, 278 bp, Cyanidium caldarium
  unsure at all n locations
  Clone ID: LIB190-038-Q1-E1-E11
tccgagcaagtacagggcggcccgagaatagagaaggcgtaagacgtgatacagagtangaagaaaagagaagagacctagaaaagaggtaaaagaagagtaaaacgactacaaaacgtacggaattcacgaggaaggagcgtgaacgaangaggaatcccaagtaatcgatgaagaaaaagcttcggtgaaagcgtgaacggattttgtacacactgcccgtcaagttctggaagtgtgctangaataagcaggagaagtagaagagagtangaaaa

SEQ ID NO: 4452 - DNA, 446 bp, Cyanidium caldarium
  Clone ID: LIB190-038-Q1-E1-E2
gggtcgacgcacgcgtccaactttatggactttggatttgcacgtgtgggtgtgctcagtcagaactgcttctcagttagttacgcaatatgcctagtcataaggaacaaaataaaggaattaaaatatcagctgacggttacgcactaaagttgagcggtattcggttggacgtagacggcagtttggtcactatggtggacgcagacgacctcagagccctcatgtttaaggaaagcctcaaggaaaagtcaaagctgcatgacccaaaatttttcaaaagctattatgaggagaataaggactacttttattatatgactcatacggagaagaaaatgtttccttctctggaagttgcacgagaatacgctactctggtgggaaactcgtttctgcagaaatatttggacaaagtcattgagcacgaacacgcatactaagga

SEQ ID NO: 4453 - DNA, 344 bp, Cyanidium caldarium
  Clone ID: LIB190-038-Q1-E1-E4
ggtctagaattaccgggtcgacgcacgcgtccgaccacgacgtccgacgaaaggttacctatggcattgctattcctacaattcttgttgctggtgttattaatggtcatgttgctgcaaagtttatctttactcgaattttccgtggttctcggcacttgcatgagcatactgttattgggtggggtacttggattggtctgtgtgctcttgcctggattattgcatggataatatcagaagtcattccggtatttaatgaccttcttggtttagtagcttcattatttgcgtcacaatttacttacggcttgtctggttacttttggttatttgataattat

SEQ ID NO: 4454 - DNA, 286 bp, Cyanidium caldarium
  Clone ID: LIB190-038-Q1-E1-E5
ccgggtcgacccacgagtccaattgggcgattgtgtgaagttgtgatggaaacaactgcgtctagcaagtcggaacaaactggtcaccagtgttctcatggtgttgatgcggaaggaaaaccgaaaaagaagatgtgttgtgcgtgtcccgaaacaaagaaacagcgtgatgagtgtattttgcaacatggagaagataagtgtaaagaattcattgaagcgcacaaggcctgtctgcgtcaagaaggcttcaaagtgtaaagaaaggaaataaagcttttggaat

SEQ ID NO: 4455 - DNA, 250 bp, Cyanidium caldarium
  Clone ID: LIB190-038-Q1-E1-F1
ggtcgacgcacgcgtccgagcatacgtccggtgcagtatagtgtgtgcggccatccaaatattacacatgcaatcgagtaaagtgaacgcgagtataagatggtgtataaaaattggcggtcctaacagtacagatccatgtgtaacgaagttaatatacgtttgataggcgtcctgtatgcagggatatgacagtatgacactgtcaatgtcgtctaacacaacgtcacagcaatagatgttacaatgc

SEQ ID NO: 4456 - DNA, 339 bp, Cyanidium caldarium
  Clone ID: LIB190-038-Q1-E1-F2
ggtctagaattcacgggtcgacgcacgcgtccgcggacgacgtgggcggacgcgtgggcggacgcgtgggcggacgcgtgggttgttgggccttgtggtggtgatgccctggattgagctacgtagtggcaactccgctgtcttgaaagacataactgcaagtattgaaaagcctgacataaaatggataactaggacgaatctcagtacttgtctgaattctgcagaaggaaatgttacggttgacttgtcgcggcagtgtagcttgaaagatatattttcattgaagcttctcgacaataactttaagttggcgtgttttaatgatgccttgttttt

SEQ ID NO: 4457 - DNA, 451 bp, Cyanidium caldarium
  Clone ID: LIB190-038-Q1-E1-F4
gtgacggtctagaattcacgggtcgacgcacgcgtccgaccacgagtccgggaacgaaagagctctttgggccagttaagtcaaaatcgcagcagtcagcctgttggcagtcattcactaagattcctttcgcgtcgcacagttttgatttcgacaagtatgcatatacaggtttcagaactacgtgtataagcctaacatccggatggtgtgttccactcattctgatgtatctttatagcaacgcttcggaggacaacaagcaggaatttgtccaaacttgctgttttacacacgactgaactcgaaggacggtggcgctttctcagttcattaaagatttcctcacttaatcttttcaattcaaaatacaatgctatattgcttcaactacgcgtcatagatttgaatcgttcgaaaagtaaattcagccgttcagtggacaacgacg

SEQ ID NO: 4458 - DNA, 454 bp, Cyanidium caldarium
  Clone ID: LIB190-038-Q1-E1-G2
atttacgggtcgacgcacgcgtccgtatgacacaaggcacgcaggtttatacggtggagcaggttgcaaagcaccacacacgtagtgacttgtggattatcatacacggcaaagtatatgatttgtcttcgtttttagatattcatcctggtggcgaccagatacttttacaatatgcaggtgacgacggtaccctggaatttgacaaggcagggcacccagaagaagcccagttattattgcaagattactgtattggttccgtaacgagagattgtgttttagaatgtgatggtttagtaaaactgactccccaaacaagtgtctggagaaagtgctggcgatggatggacacctcggcattggatagctttcattggctgttgttactcgttggaattgtttctgtcctgttgattgttgctcatttttgaaatggatagttgttgtacat

SEQ ID NO: 4459 - DNA, 433 bp, Cyanidium caldarium
  unsure at all n locations
  Clone ID: LIB190-038-Q1-E1-G4
attcacgggtcgacgcacgcgtccgaaaagaaaatggattcggtagtgaaactatccaccaagcaactggacctctttgtggagtcaggaaagcctgcttctactagtttgacagttgaaaatatttctaaaacttgtatatgttttaaagtaaaaactacacagccacaaagatactcagtacgtccaagtgtangggttatcaaaccaggcgaaaagaaggacattctaataactcttgaacctctcaaagagataccggaagatctaaagtcaaacaaagacaggttcctactacaagttgcaagaatatcgacagatgcagccacaacagacgttcacgagttgtggaaaagagtaaaggaagactccgtgctgcagcagaaatttcgagttcagtttgtattaggtggacaaaacgcagatattggct

SEQ ID NO: 4460 - DNA, 388 bp, Cyanidium caldarium
  unsure at all n locations
  Clone ID: LIB190-038-Q1-E1-G5
aattcccgggtcgacccacgacgtccatctccttgcgaggaatttcttgcggggccgaagactcgctttcttgttttgtggtggttgtcgctttttgtctctcaagtttttgccgaaaatggttcaacagtggagagcagcaggtctcacttatcttcgttatgcaaatatatgtgcagattttgttcgcaaggcactaaaggaaccgaaaagaactgaagcattgtcgaggaccggttttgagatgacgagaagcgagtggagtgaaggcaaggttgtgaagagagagacccttacacaagagaatgaaactagtaacgtcgccaagagtaacaagtgaatgtgtttgttgtaatanacgtctagaagaaggcgtacgtgtcanaaa

SEQ ID NO: 4461 - DNA, 208 bp, Cyanidium caldarium
  Clone ID: LIB190-038-Q1-E1-G7
cgggccgacccacgagtccaagtaaaagaagaaagagaaaggaaaaaactgagtatcaggaagaaaagagggagtagatgaggaaagaaagatcaaggaagtaagagtaagagaaggagtaatgtgaatgaaagcaggaaagtatttgaagaagagagtgtaaagcgcgtaccttttgcataatgtcccagcgagtgaaagaggaagc

SEQ ID NO: 4462 - DNA, 441 bp, Cyanidium caldarium
  Clone ID: LIB190-038-Q1-E1-H1
attaccgggtcgacgcacgcgtccgaccacacagtccggtttacccaccaatcttctcagctctcatatggatgtggtccctgtagagactcgaagttggacaatggatgcatttgctgggatagtggaaaacggtacaatgtatggaagacgtactcaggatatgacgagtgttaccattcaatattttcaagcacttggaaacctattacagcgtggatggaagccagatcgaactattttggtttccgtagtgcccgatgaagagattggagggacgcaaggaatgggagtgtttgtagaatcggaagaattccagaaatggaatattggttttgaattggatgaaggattggccaatcctgactcttttatgtggttgtattatggtgagcgacagccttggtggttagttattggagctatcgatcagcctgcaca

SEQ ID NO: 4463 - DNA, 413 bp, Cyanidium caldarium
  Clone ID: LIB190-038-Q1-E1-H11
cccacccgtccgagtatatattgatgacaaacaggaagagtttctcagcgctttaggattggtgtgtgtataaaagcgacaaaggtctggctttgaagtaattttccgtctccagaactgcaacagcctatttgcactagagtgtagtatttgttagaaagtccataaaaagttgacctgctaatgccattgtttgtatgggaagagtcgcgtcattttgtattgtcgttcacaacaaggttcatcttttgatgttttttcggttcttaagagttagtgcagtgttgagaagtagcagtacttttggtgtgagagccaatttcttgtcttcttgtttagagacatcctctcttgtcaactcatgtgtctttcgattctgtggagttgctctacgaaagaagaaactttttttt

SEQ ID NO: 4464 - DNA, 415 bp, Cyanidium caldarium
  Clone ID: LIB190-038-Q1-E1-H12
acccacccgtcaaacgtccaatatgatgcacgcaaagaagtgacgcagtacatcagagagtgaacacatgcaagtatgtaaatccagtcagatagtaaagcggctacgttcaatagaaggcgttatttattttgacaaaaatcaatcagaagtggatggtttgagtgttcatagttttgataccgagtcttctggtagagctgtgacacacgagctggagcgtactggaaagagtgagcagagcaaaatagtaacgcatacctctgaaaacagcagaagaaaaacaaagagaccttggaccgcagaagaagacgagaaattggaggagttggtgaaacagtacggtagcagcagacagtggagtttgattgcttccaaactaggtcaaagaagtggaaaacagtgcagagaacga

SEQ ID NO: 4465 - DNA, 358 bp, Cyanidium caldarium
  Clone ID: LIB190-038-Q1-E1-H2
cgggtcgacgcacgcgtccgaccacgagtccgggcggcaaggagcaagaagaacgtcaaaaggcaatagaagatttccgcagtggcagaaaggacgtcctagttgctacggatattgctgcgaaggggttagattttcctcaagttcagcatgtcatcaactacgatatgccaaaggacattgaagactatgttcatcgcattggacgaactggaaggcgtgggaaacggggtcttgcgactacttttgtcaactccacctgtaatatgagtgtattattagatttgaaagaacttctcatcgaagccaaacagaaagttgcaccctttttagaaaatttggatgtgcacaactttgc

SEQ ID NO: 4466 - DNA, 450 bp, Cyanidium caldarium
  Clone ID: LIB190-038-Q1-E1-H3
gggtcgacgcacgcgtccgaccacacgtccgatcacttgcacaaaagatgatgatatccaagtgcaatgtaaaagggaagcccgtgattacggctactcaaatgttggagtcgatgattaagaatcctcgtcctacgagagcggagacgacggatgttgccaatgccgtatttgatggcagtgattgtgtgatgctttcaggagagactgccaaaggtgattatcctgtagagactgtacagacgatggttggcaattgtcgtgaagcggagagttgtattgattacaattataattttacatgtttgcgcaatttgatgagacaacaaaagccttctatcaccgaagtgattacttcttctgctgttcgaactgcttttgacttgcatgcctcgctcattctttgtttaacggagacagggacgactggtcgtttggtatgcaaatatc

SEQ ID NO: 4467 - DNA, 419 bp, Cyanidium caldarium
  Clone ID: LIB190-038-Q1-E1-H4
gcgtccgacctaatccattgtcttcatggctagtggctccaagagcaccaagtccaacgaaaaagtccaaatcacaaaagaacaagaggaagagtttcgcgaagcttttacgttattcgacaaagacggggatggtaatataacagtaaaggaactcggtacggtggtccgttccttgggtcagagtcctacggaagcagagttgaaagaaatgatagcagaagttgacaaggatggaaacggcaccatcgactttcaagagtttctcgacttgatgtccaggcatatgagacaagcagatacagaagaagagatacgtgaagcgtttaaagttttcgataaggatggaaacggttatatttctgccgcagagctgcgtcatgttatgaccagtttaagcgagaaacttacagatgaag

SEQ ID NO: 4468 - DNA, 428 bp, Cyanidium caldarium
  unsure at all n locations
  Clone ID: LIB190-038-Q1-E1-H7
cgggtcgacccacacgtccagagagttttcgtgcaagttatggctgcgttttgcgctggttgcatacttgtctcaagaagcaacagttccaaagagtgattggtagcgtggaattctgtaaggaaccgttagttggacaaaaaagtgcaacacaggcacctacggtccaacaaagcaccgattcacaaagctcaagtttgaatggatttagcaacgagccaatggatatgaatgagtggaaacgtaaatatagtaatacggacacaagaacggaagcacttccttggttccgggagcactttaatccatcccaacttcctttgtggtattgcaagtacaagtataacaacaagttggaaaaaacttcatgtcngcgaatttggtatctggatggtttcaaagattggagcctttaagaaagtatgctt

SEQ ID NO: 4469 - DNA, 415 bp, Cyanidium caldarium
  Clone ID: LIB190-039-Q1-E1-A10
cccgggccgacccacgacagtccatgctcgtccttggccaggtattttaagaacgttattgaatgatcatcgaagatttgaagaaacctattttcatccatttcctggttattactatactggagatggttgtgtaagggatgaagatggttgttattggttgagtggaagaatagatgatgtgattggagtaagtggtcgtcgaattggaacgaccgaagtagaatctgctcttatttctcaccctcatgtggctgaagctgctgttgttcctgtgccgcatgaactgaaaggacaagctgtttatgcttttgtcactcttcgagcaaatatccaacctagtgaaaacttgcacttggagttgcgacaagtagtaagagaaaagattggcgctcatgctgttccagaaatgatt

SEQ ID NO: 4470 - DNA, 428 bp, Cyanidium caldarium
  Clone ID: LIB190-039-Q1-E1-A12
ggtactagtccagaattcccgggccgacccacgcgtccacccacgcgtccggagcttcccctggcggacgtttttttcgtgaagcaaacaacaacaacaacaactatcggtcgcgcaatgcttacagtgaaaccccatcacaacttgttgaaatgggtatttttcaacatccctgcgagaacgaactagtttgtaagagtaccaacgaaaagatcccgttttttaacgctccaatatttctggaaaacaagacgcagattggcaaagtggaggaaatatttggtcctattacagacgttcactttactgtaaaaccagtggaaggtgtattagctacttcttttggtgtatgagacaaattctacatcggctcagagaaactgctgccgcttgaaagatttcttcccaagccacctggtagtcagagt

SEQ ID NO: 4471 - DNA, 182 bp, Cyanidium caldarium
  Clone ID: LIB190-039-Q1-E1-A4
agagatatataggtgtagggtgaagtggttgctagtttcttgaatgcttggttttgcatcaagttatataataagtattgcaatagctccataaaatcgcaatactagtgttctttttgggttaaaacaagtctcacagaacagttgaaagctcgcttggtccaataaaaaagaaaaactgc

SEQ ID NO: 4472 - DNA, 202 bp, Cyanidium caldarium
  Clone ID: LIB190-039-Q1-E1-B1
cgggtcgagccacgcgtccgcccacacgtccgcccacgcgtccgggtcgtagcgctatttccctggctttattttcgacggatgaatcctttgattccgacgaggaatgactgcttcctcaacaactaggatcgcgttgaaagaagatatccaaagtttctttctagatatatacggtaaagataaattcgaattgatttgt

SEQ ID NO: 4473 - DNA, 424 bp, Cyanidium caldarium
  unsure at all n locations
  Clone ID: LIB190-039-Q1-E1-B10
gtactagtctagaattcccgggccgacccacgacgtccgatttaatcgttcaagagacacacgactagaaaagcttacgttctgtagatctacgagtcgcaactattcaccaatggaatttcctgtacaaaagctacaggaggaagagaaagaaactttaatagacactttgccctatgtggaagaaaacctcttggaagactcagaaacttctcgaaaggtcgctagcctacttgagcaggaactgagccaagtgaagaagaagaaatgggaggaacaacagacacaggggtttctggcaaacaccttggttggaatagaagttcaaagaatggaggacgggttgccctcggagtatgaaaatccttttacgagatacgaagtttctcacccgaatattacanaacaaggggatttgaacacg

SEQ ID NO: 4474 - DNA, 430 bp, Cyanidium caldarium
  Clone ID: LIB190-039-Q1-E1-B12
gtactagtccagaattcccgggccgacccacgcgtccacccacgcgtccggaacgcaacgcggcgcattgaaaattcatgatgaagttgttcgtagaaaactcaaagtatccgttgttggcattccaaagacgatagataacgatattgcacttattgataaaagttttggattcgatacagcagtagaagaagcacaacgagccattcgcagtgcagttgttgaatcgaaaagtgcccaaaacggtattggcttagtgaagcttatgggtaggagttcaggatatattgcaatgtatgcaactttggcttcgcatgatgtggatatttgtttgattcccgaagtatcttttattttggaaggaagttgtggtttgttagaatatatccgcagcttgttgaaaaggaaagggcattgcgtcattgttgtt

SEQ ID NO: 4475 - DNA, 413 bp, Cyanidium caldarium
  unsure at all n locations
  Clone ID: LIB190-039-Q1-E1-B2
ccgggtcgagccacgcgtccgaccacacgtccgaaaagactcaagtaattgtatatttgtttttggttgtgttgctgtanggcaaatatgagttcctttgatccggacaagttcaaacaagaacaaaaagctcgctggaatcaaggagctttatccacgtggaccctgtggaaaaaaactcaagtagaagatactccagcaaagttcttcctaagcctagtacctattcgaccaggagtgaaaatcttagaccttgcctgtggtagtggggaaacctcccttcaagttgctcacctagtttccagccacttaaaggatgaagccaaagacgcaaagatagtttgcgttgatatttcggacgaaatgcttaaagttctcaaccaaagagcacaagaaatggggctaacaaatat

SEQ ID NO: 4476 - DNA, 404 bp, Cyanidium caldarium
  Clone ID: LIB190-039-Q1-E1-B3
gggtcgagccacgcgtccgagagcatatgccgtcctcctcttctagcgatcattcttttcccggaactaaaaaaaagtttggaaaacttgggcggttccgaaaaaggccccggatatatgagaaaaagaatggcagtaaggtttcctgttaaaggcagttgaaacgaacaacaaacaagtgtgggataattccaattcaagtaacgcttcaaaacggcaaagtgaagatggctatcaaggggaaaacaaaacctagggatatatccaaagagttatttcctgatttagccaagagagctatagtggcagtggtcaacgataaactgtgggatctgaatagacctctagaagaagattgtagcttgaaaatatgtgactttgaaactccagaaggaaaatcagta

SEQ ID NO: 4477 - DNA, 281 bp, Cyanidium caldarium
  unsure at all n locations
  Clone ID: LIB190-039-Q1-E1-C1
cgggtcgagccacgcgtccaattcaagtggtgtagaaaaagatattattacacacgnaaaaaaatggatatttggctagcaatccttgaggaatacgtggcctatccttgatcgacaattatttcaagtatctgatgatcaaatttatcgaatacaatgcgaaatgagaaagcgagtggttgagttttccgatgaaacgtttgccaccgaatttacaagacacttgctctttcctcgtcactctacttgagtataaagaatttatgttttatattccgtgg

SEQ ID NO: 4478 - DNA, 395 bp, Cyanidium caldarium
  Clone ID: LIB190-039-Q1-E1-C11
acggtcaggaattcccgggccgacccaagcgtcagggcttctttcacaatgcttcactgctgactgtatattcacttgctattgttcacgtatacttccgtgagggcttgagcttgcgtgttttgtcgtgcatagtacacctagagattctggaactggaagtttcgaagatctttgagcaagtcccaacagaattgacctctgcagatgcttttcattcccaagaaatttcactgagtgaacaatttcatatgcagcgtgagttttttccttacgcaaactatggacgcatttttactcgaagatttgagctttgtctgtgaacaccagagtcagaatataatttatccatgtaaagtttgccgctttgttcgtaagtgaatgacactgtgtgt

SEQ ID NO: 4479 - DNA, 206 bp, Cyanidium caldarium
  Clone ID: LIB190-039-Q1-E1-C12
gtactagtctagaattcccgggccgacccacgcgtcaagagttggccaagcacgcagtttcggaaggaaccaaggcagttacaaagtatacttcttcctgaattcaaggttgataaatagactagcgtacaagtgtttttgtgtgttttgaaaagtttgtatggttgaaaagcgtcgatgtacaacgtaaaaagaaagttttttat

SEQ ID NO: 4480 - DNA, 419 bp, Cyanidium caldarium
  Clone ID: LIB190-039-Q1-E1-C3
gggtcgagccacgcgtccgatcccaatgagcaagtctacccatatattcttcggtgcctttcttgttcttctcacaagaatatgtatctcttcagctgcatgttctgactcagtcatgtctcagatgcaaagtatttttgtcaagaatttcactcaaaatcgtgcattagctccattatgccttagaggtgcttttcacgattgctggaatggatgtaacggagcactgttgcttccagaggaaataagtagagctgaaaacctcggcttggaacctctaaaaccatatttggaaccatttctcagccagtttccttgtgttagtgtagctgacctgatcaactcttgcgccgttacagctgtaaagttcctaagtggtccagatgttcctgttacttttggcagaatagataccggag

SEQ ID NO: 4481 - DNA, 401 bp, Cyanidium caldarium
  Clone ID: LIB190-039-Q1-E1-C4
acgcgtccgaagacaactattctcgtgctccatcgttttctagccatgtctcagagaaattattgcgaaatagcaatacttctgagtttcgcgagccacacttgtatcgagactctcagaataatccggagaatacttttttgacagatttacctgcgaatgaacaagaaaatatgagacggctatcatttcgagattggagtctcgcagagtcactcgatactgttactcctgctgtatctagaccgattgctgttcatggaccaaaatattcacctcaaacgacgacaagagaagctgggtcggatatccgagcggaacgtgaactttggcaacggaaaggacatttggtgaagttttggcgacgacgatttgctgctatactaccacattctgttttt

SEQ ID NO: 4482 - DNA, 404 bp, Cyanidium caldarium
  Clone ID: LIB190-039-Q1-E1-C5
cgggtcgacccacgcatccagcgtggagatagagcaacggcagcacaaagtttagaacttcgagttccgtttcttgatagagactttctggatgttgcaatgagtattcatccgcgtgaaaaggttacttctaagcatagaatcgagaaatatatcattcgttatgccttttccaaggagttttgtggtgaagagtatcttcctgacgatattctttggagacaaaaagaacagttttcggatggcgtgggctatagctggatcgatggtttaaaggcgtattgtgaaaaggccgtttccgatgcagacttgcaaaatgccgctcagcgttttccgcacgatactccaacaaccaaagaggcatatgtttatcgagctatattcgaaaaacattttgggaattg

SEQ ID NO: 4483 - DNA, 323 bp, Cyanidium caldarium
  unsure at all n locations
  Clone ID: LIB190-039-Q1-E1-C6
cggtcgacccacgcatccacccacgcgtccgcgtagacgtcgtaccaatattccgcccacactctacgtgcaacttatcttgtgacatacaatcgttggtcanagttatatgctagcgtatcatagatggtacatgtgtagaagatgtcagcacatgttcttgcggcttcagcattacaatggagtttctatcaaatgattacaatcaatacttgatggtctggtttaatgatgataagtctgtcaatgtccaggataatagatcttcgaaatcgcaataagggtaaggaagaaaatcctttggctaggataagtaaggaaaa

SEQ ID NO: 4484 - DNA, 235 bp, Cyanidium caldarium
  Clone ID: LIB190-039-Q1-E1-C8
cccacgcgtccgcccaggcgtccgaggtacgatattttgcttggcttagctttattatggctgtagcatatgcttccaactcccgtttctctcaagtatacgtgaaacagttggtatctgcagttggtctaagtatcgttatcttgttgatatcgtatttgtcaccctctcctcctcctcgtccaactgcataaagttttttcatgttccaaaagccgtgaaggacatcaataat

SEQ ID NO: 4485 - DNA, 416 bp, Cyanidium caldarium
  Clone ID: LIB190-039-Q1-E1-C9
ccgggccgacccaaacgtcaacccacgcgtccgaaaacgtgtgtagcaagcgtagagcagaagaactgggtgtaaaggtcgagtagtagagtaagtgtaaaagggaaaggaaaggagagaaagaggaaagggatgaaatgcagagatctctagagaaaggcaagaaagaaaagaaaggaagacacagtaaatgaggcgagaaagcataggaagtgaaacggattaggaacccgtgtagtctatgcagtaaaagaaagaatgagtaagaaaaaagggagtcattccaccaggggagtaaaggcgcaagaaagaaacccaaagcaattgacgggaatcggaaaaaggggtggatcacgtaaattaatccgatgtaaaccgagaaacttacctctccaagaaagtgtttcacggctgtc

SEQ ID NO: 4486 - DNA, 414 bp, Cyanidium caldarium
  Clone ID: LIB190-039-Q1-E1-D1
cgggtcgagccacgcgtccaagaggagatggtaatgataatagcatgtatggtagtccattggagcaatttgaagtggtatcgctgtataagatggagatagaaggaacggaaatacggataagtaacatacgagtgtatataataatgatgagtatagtatgggtaaagaagatggagaggaggataatgaagaagaacgggacgtgggagtggatacgagaggagtattacagagtgataggaaggatagtaaaggagaatgtacgagaggagaggtatataaggaaggattacatgaacgacgagataatatgagaaatgataacgtggatatatatatcgataataagtgtggagtaaacagaaaacgaagtaaaacgacggaatgaacggaagttatggcaaaaacacg

SEQ ID NO: 4487 - DNA, 412 bp, Cyanidium caldarium
  Clone ID: LIB190-039-Q1-E1-D10
cgggccgacccacgagtcaacaaccacattgtttgcaacggaaatgattcgatgacttatgatgacccttcagtagttcttccaaccagcggtaaccctcaactatcctagtgaaaaaggacctctttctcctcgttttagaggggaacatgctcttagaagatatccatccggacaggaacgctgtatagcttgcaagttatgcgatgcaatttgtccagctcaggcaataactatcgaagcggaacctcggcctgatggttcaagaagaaccacatgatatgatattgatatgacaatgtgcatatattgtggtatgtgccaagaagcttgtcctgtggatgccatcgtagaaggtcgcaattttgagtatgcaacagaaacgcacgaagagttgctgtataataaggaa

SEQ ID NO: 4488 - DNA, 414 bp, Cyanidium caldarium
  Clone ID: LIB190-039-Q1-E1-D11
aattcccgggccgacccacgcgtccacgagaagttgtaaaacttgttgtcagaaccaagaaacatttacgagaacaaagttatgcatttactgaccaagatggtggtagaacaatgcaactggtatcagagttcctttgggacgttttgaaattcctttcgacagatcctcagactgaaatatcagcactagttcgagaaatattgaaggatatgagcagtagctctagcgaggagcaaatgcagcgtggaagcgttgccaaaaaatccagtgagcatatggatgtcgcatcgaacgcatcttccttgtcttcatcaccaggttctttggaagaagtcatgcatagtagaaaggattctcttccgagaagctcgaattccatgcctcgtgtcatgtcgatagaaggaataagtc

SEQ ID NO: 4489 - DNA, 430 bp, Cyanidium caldarium
  Clone ID: LIB190-039-Q1-E1-D12
aggtacaggtccagaattcccgggccgacccacgcgtccaattcgcttgtggcgtgtgaagttttggttaccttgaaataatgcagatatttgtaaagacacttacaggcaagactataactcttgaagtggagccttcagatactattgagaacgtcaagtccaagatacaagacaaggaaggaattcctccagaccagcaacgtttgatatttgctggaaagcaactagaagatggtcgtactctttcagactataatattcaaaaggagtctacccttcacttggtaatgcgtttgaggggtggaatgcagatatttgtgaagacacttacaggcaagactataactcttgaagtggagccttcagatactattgagaacgtcaagtccaagatacaagacaaggaaggaattcctccagaccagca

SEQ ID NO: 4490 - DNA, 439 bp, Cyanidium caldarium
  Clone ID: LIB190-039-Q1-E1-D2
gggtcgagccacgcgtccgagttgatggtcgtttccaagatgttcagggtaaagtagacaccaaaactccaagtatgtttctcgatattgaaatgaaacctggttgtgtaatgaatccacaaatatctcacgaatctcgatgctttatatacgttttacaaggcaaagctctatttgggaaagatgcttgtattggaagtgcacacgagttgttgctattggatggagaagaagatcatatcgtgtgtcaaagcaaggaagacagctgtcgatttgtgttggtagctgggaaacctttgaacgagcccatcgttcaatatggaccttttgtgatgactagccaagaagatattatgaaagcttttcgagattatcaaactggaaagttttaaaattgccgaaataaaaccatttgtgtattcccaactaaaaatgtgta

SEQ ID NO: 4491 - DNA, 349 bp, Cyanidium caldarium
  unsure at all n locations
  Clone ID: LIB190-039-Q1-E1-D3
cgggtcgagncacgcgtccgaccacacgtccgggagcgaccaaatcagctcaacgtagaagaagactgaaccaggaaaagtatcaaattcgattggctattacgccgtatttacaagccgaacatgaccgtttggaagtgaaagagacgcatcgtcgtcttcggcaagaagcagaacttatgaaggatgttcctgaatatcaaccgggagaaaatttgtacaaaacaagaaagtttactccctatgtcaaaccgctagtacctggagttggtccacaaggactttgacagttatctaaagtgatggttgccaataaagctggaatggagtttagttttgtgcacaaaaa

SEQ ID NO: 4492 - DNA, 371 bp, Cyanidium caldarium
  Clone ID: LIB190-039-Q1-E1-D4
gggtcgagccacgcgtccgagatcacaagaagcagcagtattagcacatgcacagtcattgctcgagtttcatgcacgtcatcaagtaatgtggaaagttttggggttccacccgagtaaaaggaatggtatcaaaactttatgtagttcgggttgtgaatgaaggttcctagaatgatctggtactaatgtttgcagtagtaaaatggtgattacttgctaatgggaagacacgcgagttggccaataggtcgatatagtgttattgcaggtttcatggaacatggcgaaagtatagaagatgcaatttatcgagaagtaaaagaggagacctttattcaagttggtcgttgtcggtatcattcttcaca

SEQ ID NO: 4493 - DNA, 407 bp, Cyanidium caldarium
  Clone ID: LIB190-039-Q1-E1-D9
tcccgggctcgacccacacgtcagacttgatggacagaatgggaagaagagtgctgtggttaagtttattaccaggagtgctcgttggatgtttcattataggctttagtttccgagctagcaacatccatgtcgaagaaggaatttacatttggggtatcataacatattatatgttttggggttctggtatgggaccttatgcttgggtactgggatcggaaatatatccaacttatattcgaagtgaaggaatggcgctagttacttggtggacatacattggaaactttattacgacttattgcttttccaagatgaaaagagcaatgactgctccaggaattttcattggtttttatggaggttttgttactattgcttggttctatgccatgtttatgatg

SEQ ID NO: 4494 - DNA, 410 bp, Cyanidium caldarium
  Clone ID: LIB190-039-Q1-E1-E11
ccgggccgacccacgacgtcaggtcggcagcctgttgagttatcggaggttgaaacgtcctggaagaattttgcaaatagagcagtcttcaatgaggttccagtttttcaatgcaaacctgtttcaggaatccatgtgaatcgtattccaaggagtcttttgcttcttggagacactagcaacccttcgagctttgttgagatcgcgaaacattgcgatggacttgttcatgaagcgacgttcctggaagtattgcgggataaggctgctgagtcgtttcattctacagcaaaaatggcaggacaatttgcgtcatcactaggaacaagaacactgattctaactcatttcagtagcagatatgaaaccaacttttacaagtcgaatggccaagttttggacgaaacttg

SEQ ID NO: 4495 - DNA, 432 bp, Cyanidium caldarium
  Clone ID: LIB190-039-Q1-E1-E12
ggtacaggtcaggaagtcccgggccgacccacgacgtcaggtggaaagaagatgcaaagtgctttgaaagaaatagccgactatatggtgacacctggaaaaggtattttagcatctgatgaacctcccgagttgttagaacccaagtttcgagctttgggagtggagaacaatgcagaaacgagaaggacgtggcgtgaaatattatatggaaccaaaggattggagcaatatgttgcagctgctattctgcatagtgaaacttttgaacaacaagattcatccagtgggaaacgtttggtagatgtgttatcagacaaaggtatattacctggtatcacggtggatcaaggtttcgatatattacctggtacctcccaagaaacattcacgctaggattggatactttgagcaatcgatgtgagaaatat

SEQ ID NO: 4496 - DNA, 440 bp, Cyanidium caldarium
  Clone ID: LIB190-039-Q1-E1-E2
cgggtcgagccacgcgtccgcacaagtaggcacagaagagaatatttctcatcagggtacaatagtagaagaggcaacgtcggaatctttaagtgaaaaagaaaacgaacaaggtgcgtatgagcaagaagaagcagaagaagatagccatcaacacacacatgaaggaggacacgcgcatgaacacacagcagaagagggaacaaccagacaaagcaaagcggagaagaaatctagaaaagctttgcagaaattgggtttaaaatcagtttcaggtgttacgagagtaactatcaagaagaacagaaatattctgtttgttatctcccgacccgatgtttacaagtcggccgggtcggatacttatgttatttttggggatgcaaagatagaagatctgtcagttgctgcacagactgctgcagctgaacaatttaaga

SEQ ID NO: 4497 - DNA, 399 bp, Cyanidium caldarium
  Clone ID: LIB190-039-Q1-E1-E4
cgggtcgagccacgcgtccgattcagacagtgtagagtctcacaagtcgtttgccgatgaacaaaagttgacgtttcccttattatctgatgaaggcggtaaagtacgcaagctatacggtgtaccaaagagcatgtttattatgcctggtcgctgcacttatgtcattggtccggatggtattgtacgacacatctacaacagtcaagtacgtttcgcaaaccacgtggaggaggcaaagaaggcgttggaaaagatacgaaacgacgctcaaacagcagaagagtgaacacactagactgctttgtggtttctttgataagaagagggttccagtcatgtgcttcggctggtgtggcaagttactttgttagttgtgttgaataaacgtttgttttt

SEQ ID NO: 4498 - DNA, 431 bp, Cyanidium caldarium
  unsure at all n locations
  Clone ID: LIB190-039-Q1-E1-E5
aattcncgggtcgacccacgcatccgaggagaaacaagaagtagaagagaaataaaagagacagaagaggagttatgagagaaaagatggaagtaatagaagtggtaagtggagtaataatgaatcatatgaaagaaggaatggagaatataaggaaggattacatgaaggaggagataataggagaaatgataaggtggatatatatatcgataataagtgtgatagtaatataaaggaggagatagagaggaaagaggtgtatgatgcaggcaaagaagtgacgcagtagattagagagtaacacatgcaagtaggtaaagcgaacgggtgagtaaagaggtgtgaaagagtggaagaacatgaaagcacagaagaatgtaagaaatggttagagtaaaaaccataaaggaagtaaaagcgggaatctg

SEQ ID NO: 4499 - DNA, 467 bp, Cyanidium caldarium
  Clone ID: LIB190-039-Q1-E1-E7
gtaccagtctagaattgccgggtcgacccacgcatccgagaaggatattctgcactactatggtttgagtacaaaaggagataggaatgcgcttattaggaggcataaagaattcggtaagtaagttacaattcaagcgaacatcatctgagtagattctcaagtctttcgctataatgctgagctggattcaaagttccctcgtcctgtttcgtccgtcataaaggatatcgaagaatgggagaagcaacaggagtggatgaatgtttctgaggaagcgtctaaacttccattaggaaggccactccctgtcaataatgatgcctgtcacattgtcaccagtgatttcgaatcactcgtccagcaagcaaagagaacaagggtaaagacgggaaacaacttttgtgcgtcaaacttttatgaagaaagcatgggtcaagatgatatatcagtgtttactcaacaag

SEQ ID NO: 4500 - DNA, 454 bp, Cyanidium caldarium
  Clone ID: LIB190-039-Q1-E1-E8
attcccgggtcgacccacgcatccacaaagtggagaaggtggtagtttccgaaagacttgcggaatctccatgtatccttgttactggcgagtttggttggtcggccaacatggaacgtatcatgaaggcacaagctttgcgtgattcgtccttggcaatgtacatgtcatcgagaaagataatggaaattaatcccaacaatgccatcatgcaagaattgcgtcgccgtgtggaagcagacaagtcagacaagaccgtgaaagacttggtcaatttattatttgacactgcattgttgacttccggattctctcttgacgattccaacgtttttgcctctcgaattcatcgcatgattaagttacgtcttagcattgacgaagatgaagtcacagaaaagatggaggaagatttaacccctctcgagaccgaacaggaaggaacgtctgcgat

SEQ ID NO: 4501 - DNA, 413 bp, Cyanidium caldarium
  Clone ID: LIB190-039-Q1-E1-E9
ccgggccgacccacgagtcagagaacacgtagaccgggagattcgagagaaattcgaacaagacttagtaagagcggacagggaagaatatgcttgtcttctggaagaaaataaccctcgtcatttcctggcgcttatcatcctgtgggatcagttcccacgaaatatgttccgtaaagacgcaaaagcgtttgcgtgggataccaaagcgtttgcgttatcaaagcagcttgtttcttcgtctttggacaagaagcttcgtccaatcgagagggtttttgcttatatgccgttcgagcaccaggagaacctacaaagtcagtctgaggcaatgagactctttcaggaacttaaagaggaaacctcgcggattccggatgaagcaaccaaggccaagttcacagaattcacag

SEQ ID NO: 4502 - DNA, 186 bp, Cyanidium caldarium
  Clone ID: LIB190-039-Q1-E1-F3
aggacacgtgggcggacgcgtgggcggacgcgtgggggaaaggagagaaagagaaaaggaatgaaatgcaaaaatctctagagaaaaggcaagaaagaaaagaaaggaagacacagtaaatgaggcgagacagcataggaagtgaaacggattacgaacccgtgtagtctatgcagtaaaagaaaa

SEQ ID NO: 4503 - DNA, 189 bp, Cyanidium caldarium
  Clone ID: LIB190-039-Q1-E1-F5
acccacgcatccgaccacgcgtccgattaaaaaaaaaaaaaacaaatataaaaaataaatgaaaaaaaaaataaatgaaacagaaggcaatgcgatcgctggggttagtcattggtacaacttcgatcaaaataccagttcttaacttgctgtcacatagtttcaattcgttggcaatcgtatttcttg

SEQ ID NO: 4504 - DNA, 292 bp, Cyanidium caldarium
  Clone ID: LIB190-039-Q1-E1-F6
atgcccgggtcgacccacgagtccaggtagcagttgtacattcaacatcatcaaatgccaaagggaggaaagaaagattcttcaaagaaagaagccacaagtaaacctgcagcagcagatgctacaaagacgacagaaaagtctggtccggaagccaagttgaagggaactggtgcaaagaaacaataaaaagttgactatgcatgtgcagtcctgttatgttttgtgagttctgtttgatagtttccagctattcttttggtagtgaataaagagaaaattttttatattt

SEQ ID NO: 4505 - DNA, 287 bp, Cyanidium caldarium
  Clone ID: LIB190-039-Q1-E1-F7
ccgggccgacccacgcatccacccacgcgtccgcccacgcgtccgcccacgcgtccgagagaatcttttttgaagggtgttaccgagaacccgtgtgaagagctttggagagcttacgagagatgtgtaaagagactggcttcttccagaaatcttgaacagctattgacttcagactggaatgtggacgaacaaaaagctgcctacttgacactcgtgcattccagtgtagataggaccacgaataaaaaattgtttacttgaaaaaaaaaaaattttttaaattt

SEQ ID NO: 4506 - DNA, 409 bp, Cyanidium caldarium
  unsure at all n locations
  Clone ID: LIB190-039-Q1-E1-F9
aattcccgggccgacccacgacgtccgcccacgcgtccgcaaaaaaaaggaaaaggatggcagcagcaggtcctggtgcctttgacctttcgggtttaggaccggaagaccaaggcaagcttatggctgttatgcaagatcttcagatacaagattctcttaggctatacaacgaacttgtacaacgttgttttggtgaatgtgtcgaaacttttagaagtaaaaaactcgatggaaaggaagaagcttgtgttacgaagtgtgcacaaaagtttgtgaaaatggctgctagagtaggacagagattcgcagaacagcaacagcaacttgttgcagaagcgcaacgaggatccacgccgtcttcctgaaataaatgtgaaccaactgatagaggatcnttttgtttctt

SEQ ID NO: 4507 - DNA, 309 bp, Cyanidium caldarium
  unsure at all n locations
  Clone ID: LIB190-039-Q1-E1-G1
gggtcgacgccacgcgtccgaccacgcgtccgctagcacaacacggatttgcacgcaactctatgtggcacttgaaacaaataggtacaacgaaagatggctcagccactggagtcgtgttgtctttatcttcaaaagatgtggatgctgcatggacctctgcgtggccttatgcttttactgcccaatatcagttgttatangggtttcaaggtccacaaacaattttcggggttcaaattgagggaaaggatccttttcctttaactttggcttttcaaactaatttggaggtaccgaagttcccaa

SEQ ID NO: 4508 - DNA, 400 bp, Cyanidium caldarium
  Clone ID: LIB190-039-Q1-E1-G11
gtacaggtctagaagtcccgggccgacccacgcgtccaatcaaagtaaagaaagaaggaaaaggagaagaagagagggtaggcttagaagcagcaaaccagagaggaaagcgttaaagcatgaaagaaaagaaatccgaaaaagaagagaaaaaggtaagaaagaggaccgaatcagggtaagaggtagaggagcaagaagagaagagagaatgctgggtggagtagcgaaacaagagaagggaagtaaaaggtaagaaagaggaaaggtttacgagagaaggaagtagaaagaagagagtgtaaggcggcgtcataatagaaatccgaaaggagtagaagaaaagagagagaagaaagaaaagaagagaaaagccgtactgaagaccgacacaggtact

SEQ ID NO: 4509 - DNA, 127 bp, Cyanidium caldarium
  Clone ID: LIB190-039-Q1-E1-G3
cgggtcgagccacgcgtccgacttgaacaatggttgcaaagactgctctgagttgcctctttctctctttccttatcgctgccgcagttgcagccgacgtagtttcagaggagagatggggatatgc

SEQ ID NO: 4510 - DNA, 307 bp, Cyanidium caldarium
  Clone ID: LIB190-039-Q1-E1-G5
aattcccgggtcgacccacgcatccgaggagattggtgtaaaagagccttgcccaagccccaaataaatacaatacaatgctgtcattggtcgtttcgtagatttgttgtttcactaagtgcagtcattttgaaatatggagtaaacataatgaaaccttgtatgagaaaaaatcactaatcaacatcagatgttctacttgagtacatccttttgcaaaagtgcgacaacttgtttcagacatactacaacttcaactgcatacctatgaagactactttgtagaactaatggctgaagaaaacta

SEQ ID NO: 4511 - DNA, 436 bp, Cyanidium caldarium
  Clone ID: LIB190-039-Q1-E1-G6
ccgggtcgacccacgagtccacccacgcgtccgcccacgcgtccgcatcggtggatattgtggagaagagatggagtcgaagcaatcttcatgatgcgtggaatactagtggtgcaagtgaggataacgaacaactgcaacaagtgatagacaggttgtctacgtggcaaaataagaacacttgggacattgaaaacgaatcctggagcaacaagcagaacaatatcaaatattatagactagtacgtcaacaactacagtatctcgttgggaatgccgcggttgcaagacaatgggaagtcgtagttggtggtttgactgccttgttgcagtgtgaagagttgagagtggtgttgaagaacttgcataccgattggttggcttggtatagagatggtctagaaaagagtcaggttgccgggtatgtttggttgtc

SEQ ID NO: 4512 - DNA, 366 bp, Cyanidium caldarium
  Clone ID: LIB190-039-Q1-E1-G7
gggtcgacccacgcatccgcggacgcgtgggggaagtagaaagaagagagtgtaaggcggcgtcataatagaaatccgaaaggagtagaagaaaagagagagaagaaagaaaagaagagaaaagccgtactgaagaccgacacaggtactcgaggagaaaggagacccaaattaaggtgagagaatggacgataaggaactatgcaaaaggatatggtatctgcggtagaacatatgaaagaagcagcaccgactgtttagcaaaaacacagcactctgcagaaaagagaaaatgtaaagtatagagtgtgcggcctgccaaatagtagagaagaaatcgatgaaagtgaaagcgagtaaaagatg

SEQ ID NO: 4513 - DNA, 452 bp, Cyanidium caldarium
  Clone ID: LIB190-039-Q1-E1-H1
ccgggtcgagccacgcgtccgaccacacgtccgcccacgcgtccgcccacgcgtccgcccacgcgtccgcccacgcgtccgcattgttgaatttttctgtttcgtttacttgtctttttgttgagttatcatggcacgaacaaaacaaacagcacgcaagtctaccggtggtaaggcacctcgaaagcagttggcaaccaaggcagcaagaaaatccgcacccgtaactggaggagtgaagaagccccatcgttaccgtcccggtactgtcgccctgagagaaattcgcaagtaccagaagagcactgaacttcttatccgaaagttgcctttccaaaggttggttcgtgaaattgctcaagactttaagacggacctacgtttccaaacttcggcggtgactgcccttcaagaaccctcgggagcatacttggtcggtttgtttgaagata

SEQ ID NO: 4514 - DNA, 418 bp, Cyanidium caldarium
  Clone ID: LIB190-039-Q1-E1-H10
ttcccgggccgacccacgcgtcagtgttgttgttgggtcgtcgcgttttggtgacaaggaaagataaatggtcgtcaaaacagaaacctgtagtttttcaggtttccgcatctaccccggaaaaggcactcgatttgtgcgcggggatggcaaactcctcatctttagtaaccgcaagtgcaaatcctactttcatatgcgtaggagaccggcagagttgaattggactcagttgtatcgaagaatgcacaaaataggacagcaagaggagacacagaagcgacgtcgtacgcgcaaagttgctgctgtaccgaaaccggtggaaggcgcgtcgttggaagtgatcaaagcaaagagaacgcaacgcccggaagtccgaaaaactgccaaagaagcagcgttgaaggaaatcaaacaa

SEQ ID NO: 4515 - DNA, 165 bp, Cyanidium caldarium
  Clone ID: LIB190-039-Q1-E1-H11
aattcccgggccgacccacgacgtccacgcgcaaatcgagttgcgtgtttcattttttctttgcagtgcaccgcttcgttcttttcttctcatcggaaaacagttcaacaactctggttgcaaaaaacagcttggatgaaataaaagaacccacgacttttatct

SEQ ID NO: 4516 - DNA, 414 bp, Cyanidium caldarium
  Clone ID: LIB190-039-Q1-E1-H12
attcccgggccgacccacgcgtccacggacgcgtgggtttccatcctatgaataataataataataacaagcaagactttggtattattgttactttatggaaacaagtaacagtgacacaagatggaaaagttcctttggataccttcctaactgctgcaaaggaagttttacgtgtggtagatgcctttggttcaggcttccgcatggtaaagaacgatattgctggaaacatcaaaaaactgtatcgtgccaatcaatctgttcaagctaccacgttacaggatcttgtcatatcagaaaactctccagatgggttggctactgttgcattgttatggttgaaaaggtaaaagtcctctctcgcttttgtgtcctagagacctcacgatgaatggggtgcagagcttttca

SEQ ID NO: 4517 - DNA, 424 bp, Cyanidium caldarium
  Clone ID: LIB190-039-Q1-E1-H3
gggtcgagccacgcgtccgaccacacgtccggagtagcgaaacaagagaagggaagtaaaaggtaagaaagaggaaaggtttacgagagaaggaagtacaaagaagagagtgtaaggcggcgtcataatagaaatccgaaaggagtagaaaaaaagagagagaagaaagaaaagaagagaaaagccgtactgaagaccgacacacgtactcgaggagaaaggagacccaaattaacgtgagagaatggacgataaggaactaagcaaaaggatatggtatctgcggtagaacatatgaaagaagcagcaccgactgtttagcaaaaacacagcactctgcagaaaagagaaaatgtaaagtatagagtgtgcggcctgccaaatagtagagaagaaatcgatgaaagtgaaagcgagtaaaaga

SEQ ID NO: 4518 - DNA, 433 bp, Cyanidium caldarium
  Clone ID: LIB190-039-Q1-E1-H5
gacccacgcatccgaccacgcgtccggcaaaaaatgtctcctcgcttccaaagtattcttctcttctcgttcctagttgcaataatcggctctgtaatatcgtctgccactcctctaagtgaaagatggcaaagttctacctcctgccaagagacatgtaagacagtctgtattcaaacgcagatatgttcaactccaacacctacaccaactccaagtgtttctgcgcaacaaggaaacgtataccgctggagtgagacgtatgcaactcctactccaacaccaactcttgtttgtacttatgttccgcagtgcactcaagtttgcagcagcaaatgcccaagtcagacaacttctgccgtagaaagcaacagttatacctcctcttctactcaatcctctaccacatcaacatactattatggtgctgggc

SEQ ID NO: 4519 - DNA, 302 bp, Cyanidium caldarium
  Clone ID: LIB190-039-Q1-E1-H7
gggtcgacccacgcatccacaactacttaccagtgtggtcagtacgagtcccaacaagtttactaccaatgccaaaagtataaggaggttactcagcaagaatgccagtacgtccaagagtcgtattgtgtcgagtatgaagaatgtcagcaagttacccaggaagtttctccttcagaaattgtctactacggtgaatcttcttctagcagtagttactactactagaacacttgtgaaatgcgcaaagtcgcaaagtagagtgttcttttttgaataaactgttactttttgtcataaaa

SEQ ID NO: 4520 - DNA, 433 bp, Cyanidium caldarium
  Clone ID: LIB190-039-Q1-E1-H9
aggtacaggtccagaattcccgggccgacccacgcgtccacggacgcgtgggcggacgcgtgggttctggaaggctgaaaatcctgtcgattcgaagcaatcgacatatttattctgtaaaagaacacaacaaaattttacaacttgcgtttcatagttttggaactaacttgacatgcaacaaagtaaccttcgagtagtccaatcttctttggtggcaagctttgtcctcattctaagtataatctgtgccattcatgcagtaacagccgatgaaataacaagtttcgagagaggataccaaacagttgcaccaactcagacgcagcaatgtcaaaagatttgtgtcaccgccacacaaactcaagttcaaagttgtatttatactcagacacaggctccgttcatgtctcaatgtgtcacagcattgcca

SEQ ID NO: 4521 - DNA, 424 bp, Cyanidium caldarium
  Clone ID: LIB190-040-Q1-E1-A1
taccggtctagaattcccgggctgacccacgcgtcaaggcaaccttccgcggagcgtgggtgtgtggtggttggggacgacgcgtcacgtttggatttgtgtggtatttgaatggcgaccaacagaataaccaaatagttgcgacacttgggtatcgaccccccttctaactgtggtgcggggcccgtaggggacgacctctttcactggctagctactatcatgggccctcctgactcgcgatatgccggtggagtgtgtttcctcacataccattttccaaccgactatccgttcaaacctcccacagtgcaatttagcactcgtatatatcacccgagtcttacctccaatggaattatctgcttgaataatcttcgcgaccaatggagtccatcactgactagctcgaatgtgctactgt

SEQ ID NO: 4522 - DNA, 415 bp, Cyanidium caldarium
  Clone ID: LIB190-040-Q1-E1-A12
cgggccgacccacgcgtccatgacgttccacgttttttttgggcccttgttggggtttgtctcttttgcttgtcactaccatcagtgcagataacttgtagatatccgttgactgaaatgacagacaaggttggtgactacctgaactgtgtccaagtcgaacgagtgcatgccattgcgaacagaggacccaatgaactgtttgcaagcggagcactttctgaactacagtacgtccttttccggcttatctaaagtaggagtggagtcttcccatacgtgcagtcgacgagacaagtataccggtttgtgtgtcgatggcgaaacagcaacacggttgtaccaggagtcttgtcctcaagtctattcttctggcataaaagacaaggatagtttgtctatgaacaaggaaaaa

SEQ ID NO: 4523 - DNA, 454 bp, Cyanidium caldarium
  Clone ID: LIB190-040-Q1-E1-A5
aatgcccgggccgacccacgagtcaggtgcccgttcacagcaaacgcagccgcagacgacctgaattttggagacgaatacacggagaacctcagaaatacgatacagaacttcccaacccccaagaagatatatgaaggtctcaatgaatatgtcgtaggtcaagaaaaggcgaagaaggttcttgctgttgcagtctacaatcattataaacgagttgccctcaacgaatacttggcttccctttcgtcggaaacaggagaagtcagtgatgctggcacaagagggaatggtggcgcaagtaactttgatgggaggactcaggactttcgtgtcggcgaagttcagtctccttcaacagaagaccttgcttcaatagtgcctcagagactaggttttccctcaaggcactccattgttcatcccggcacttctttagcaaggggctatacta

SEQ ID NO: 4524 - DNA, 445 bp, Cyanidium caldarium
  Clone ID: LIB190-040-Q1-E1-A7
cccgggccgacccacacgtcagcccacgcgtccgcccacgcgtccgtgagaatcatggtagacactaagcttaaggacggtgctagtgctgctctttggacttgccgccgatttctctatacagttgtgttagcattttcagcaacaataattggacttgatggaatgaaggcagataacatatggaacgatgccctatattatcatggtaaagtggtgaacttttgtgcatattcggcttcgtcagtttttgaaagtggcgaccatggcgcatgtaaatatgtgatggctttggcttctatcagcttgattttagatttctttctttggttggccgcctttgtcgacgcattgtatccaattcttacaaagttctggtttgtggagcttggtatcaacatattccttactatgtggtggttggttggtgcaatttagtgactgc

SEQ ID NO: 4525 - DNA, 223 bp, Cyanidium caldarium
  Clone ID: LIB190-040-Q1-E1-A9
tacggtctaccattcacgggccgacccacgcgtccatgcgatatacaggtgtagggtgaagtggatgctaatgttcttgaatgcttggttttgcatcaagttatataagaattattgcaataggtccatgaaatcgcaatactagtggtccttttgggttagcacatgtaaaggggacaggattggagcaacaaaggaaatggataaaatgcaaaattgtctg

SEQ ID NO: 4526 - DNA, 300 bp, Cyanidium caldarium
  Clone ID: LIB190-040-Q1-E1-B11
gcgtccacccacacgtccgaaaggagggaatgaagggaagttatggcaaaaacacgtgccagcagcagcggtaaaacgtgtgtagcaagcgtagagcagaagaactgggtgtaaaggtcgagtagtagagtaagtgtaaaagggaaaggaaaggagagaaagaggaaagggatgaaatgcagagatctctagagaaaggcaagaaagaaaagaaaggaagacacagtaaatgaggcgagaaagcataggaagtgaaacggattaggaacccgtgtagtctatgcagtaaaagaaagaata

SEQ ID NO: 4527 - DNA, 446 bp, Cyanidium caldarium
  Clone ID: LIB190-040-Q1-E1-B5
gaatgcccgggccgacccacgacgtcagtgtggttcgtcctggcggttggttgcattggtggaaagcttcatgacttcactacctcagttattgacgtggaagagagaaaagtctgtggataagaagccaagtgaacagtctcatgcagaccgaatggtaccagatggtttatatgaagtgagagctattcaacttcctggaggttcgtggagacattattatgtagaccacgcttccaagtcgacgtattggattcttccgtatcttcacccggatggtttacgtcactcgttggaacaagaagtggactacttaccttcttatgaggaatgtgtaaaggaaacaagtcctttggcggttcctaatatttcttcttctcgttcttcattggaagatgagtagtaagggaatgttggggtcgtagtttatgcagatggtttttggt

SEQ ID NO: 4528 - DNA, 243 bp, Cyanidium caldarium
  Clone ID: LIB190-040-Q1-E1-B7
aattcccgggccgacccacgcgtcagcccgtgcgcaccctgactccggagtggattgaagcagagcgtcgcaaagagtttgcaaaggagcgagagtcgggcccgccagtggagcttgatcctatcttgcacaggcgtggctatcaccactagatagttcgattatttcagtgatttgttggcagaacagttgttgaggtttgtgtgataaaataaaatgcccaaagatgcgcttctttattct

SEQ ID NO: 4529 - DNA, 321 bp, Cyanidium caldarium
  Clone ID: LIB190-040-Q1-E1-C1
acccacgcgtccaggttaattcgtcgatcgcatctcatcctggcgtaggttagcctagttgaagtataagcatacaagatgagttcttgtacgtatctcaaaggcatctttacatttgtaatagcatatgcatgcgtggactaatcttcttctatttcagacacggaatcatactcactatcatgataaggtgacggtcatgtcactcctacgatatcaccacacgatgcaggataatactttaattctgacaagttaatatccagttagataacatatcaaccatgtcgatctgacactcgatgtcagttcatagatcct

SEQ ID NO: 4530 - DNA, 438 bp, Cyanidium caldarium
  unsure at all n locations
  Clone ID: LIB190-040-Q1-E1-C6
aattcncgggccgacccacgcatcagatttacgaggaactgtctcgagaacgaaatattcgacccggctttcgttttggtctgtttggaggtttggccaatgcggcagtagaaacgtacatctttcgtggaaagagtttttggacttttcatctgcctcatcaggcaaatgagagcttaaaacctgcttcttcttgtgaaaagattagttatccgaaacctgatgggaagcttacttttgatatcttgacatccgttgccttgagtggtaccaatcatgatcacgaccaacctccgcatttaaaagtcaaagaccgcaaagtagtggaagatatcaattggaaggtatatgcgggtccagaaagtagatactgtcctgcaagagtttatgaatatgtagaagacgattcgggacaaccaaagttacaaatcaatgctc

SEQ ID NO: 4531 - DNA, 397 bp, Cyanidium caldarium
  Clone ID: LIB190-040-Q1-E1-C8
gtacaagtacggaattcccgggccgacccacgcgtcagcggacgcgtgggcggtcgcgtgggaatgaataaagacttgatttggcaacgtccaagtttctggttcaaggttgcaggttttagtggagcagctgctgtaggtttgggagcctttggtgctcatggactccgggcacgagtcacagacccttatttgttacaaatatggaatcgtgcggcaagttatcaccagatacatagtttagctgtttgtgctgcagcctgttgtgcaaatagcgagggaaaacctgcttttgtagcaacgtcgttgttctctcttggaatagcgttgttctctggttccctgtatgctttgactttaactgtgaaccgaaaaactggtgcagttactccgtttg

SEQ ID NO: 4532 - DNA, 400 bp, Cyanidium caldarium
  Clone ID: LIB190-040-Q1-E1-D10
cacgcgtccactctacgcttgaactaaaatatccttttctatttgggtgagttcatgttcaactaaggaaaagttggtatccagataagcattcactgtgttgagttcttcctcaatgttcatggaattgtgccaaatttcagcaagtttcttgtaatctttcgtaaactcatgttgcatattggtaatgatggtctgcatatctgactcaacttgcgtcatgttgcagcttatattcaagttatacagctgagtttttaggtccactgtattattccatatttcaacaagtttcgtatattccaccgtaaattcttgttgcatggtggagataattgtggttaaacatgttgggccaccgtagaactgtaattgatcaatatggatagagcatttgaac

SEQ ID NO: 4533 - DNA, 406 bp, Cyanidium caldarium
  Clone ID: LIB190-040-Q1-E1-D11
gccacgcgtccacccacgcgtccgagaagatatttcaaatcctgaacgagtataagctttcgttgctacattcataccaagcagttgtgcagctttcataaagaaagatgttagattacttggcagctccatctcaacgccatgagaaaagtctccgtttctgaaaatccttacttggcaagactcttgactattatataaggacaactcggaacacttgtttgataggtggttatacatcttttctttgccagaagaatctcccggagaagacttgtgacgggaacggtgccgactaggaagagattcttttggaacttctgtggaagactcactttggggaatatcttcttcccctgtacaacttactaccaaggaatcctcatctatcatatcgaatatgctt

SEQ ID NO: 4534 - DNA, 448 bp, Cyanidium caldarium
  Clone ID: LIB190-040-Q1-E1-D2
cgggccgacccacgcgtcaacccacgcgtccgcccacgcgtccgcccacgcgtccgcccacgcgtccgcattcaacgaacgatgaagttccagtacgttagtcttttattggctctcttatgcgtaggttctgctctggctgctgaattggcacctggaattgcggaaaaaccggtagagagaggatatgaggaaccctgctgtaccgaatattgttattgggaagaaatatgtatcacacccacacccacacctacaccaacctactattactattattacgcaagaaatgcaaaacaggaaaatgtcgagagaagcgtagaaaagagtatctcttccgcagaaaaatctgatgcggttcgagggtatttccccacgtactactattatgagactcctacatattattactattatgagactccgacatattattactattatgaga

SEQ ID NO: 4535 - DNA, 344 bp, Cyanidium caldarium
  Clone ID: LIB190-040-Q1-E1-D3
cgaagagatttcaattcgcttggcttaagtatcgatgaattgattgatgcttatgttcagacggtgttggcagtagtagctatcgatagaatggcacagtttttgaggcctaacggtgtgttcaataagcaccttttaacctcggtggacaacgatgagtatttacttgacgagattctttacgatcaggagaaccattagtcatgatgaacaatgatttatgtatacagtttccatcccatatgtaaatatctatttgtggaactgaatgcggtgttagtacttaccccaataataaaaggtaatatacacagacatgaagacgttgagaaacagttcaaagg

SEQ ID NO: 4536 - DNA, 427 bp, Cyanidium caldarium
  unsure at all n locations
  Clone ID: LIB190-040-Q1-E1-D5
acccacgcgtcagctgaagcccagtttggcacttggatcactatagtaatggtactttgctattctttggaaactccaatcggtatatctattggtattggtattgcacacacttatcaggaaaactcctcggcatctttgttaacgagaggcattttggatgccatctccggtggaattttaatatacacaggattggtggagttgttgacttattggtttacgcgcaactcgaactttttaagacgcaaagccatatctatttttagtattgtgggatttgtctggttaggagccatctgcatggcgattatcggagcgtgggcctaagaataaaatttgtttgagacgtcgtggtgcagatgactcgcatgtgtggtagttggttcaagtttgacaagaganaacatttgttgctacttcttac

SEQ ID NO: 4537 - DNA, 409 bp, Cyanidium caldarium
  Clone ID: LIB190-040-Q1-E1-D6
gtaccagtcaggaattcccgggccgacccacgcgtcagcggacgcgtgggcttcaagttgttgtaataaatattcgagaaaagttgtagtcgtttgtcacgagtcagaaccatctttcaaaaatatatgttatctttttttaatattattatgccatgtttcttgaagctttacccgcagatgttataaggaacatatgctgtcatttggacggtgtatcactagctagactttcctgtacctgtagaaaactaagaaacgtttgcgcagatgaagctctctggtttgcttgtctcaaaagggaagttttggaagatgtaaaggaagagtttgtcctttccttaaacaaacatgcgcaatatcaaagaagctggtataagatctatcagtcacttcatggtgccgcacg

SEQ ID NO: 4538 - DNA, 451 bp, Cyanidium caldarium
  Clone ID: LIB190-040-Q1-E1-D7
aattcccgggccgacccacgcgtcagctttgtcgagggagaggattcgtcctgttctcatgtttgtggtgtggtttcctgcaagtttggtatggaaacaaccagcaacaactactcaaagaatttcaagttatcactggataactacaacatggatatctttgaaaatgaaacgtcattcttctccaaaccaccacaccgtaaggtttcctctccgcatgatgaactcggagaacaagacgcgaccccgttacttgcaagagttgcctttgattccgatcgacgaaatatactcgaaaagttttcgttggaatcgaattggttgctatgccttgtacaacggtgaccaagcactttgttatgtaagttacaccaaaaacttgcacagaaagattgcctttcacgccaagttgcaaccagagaattgcaaatttttcacagcctttgtcgta

SEQ ID NO: 4539 - DNA, 462 bp, Cyanidium caldarium
  Clone ID: LIB190-040-Q1-E1-D8
gtaccagtcaggaattcccgggccgacccacgcgtcagcatatacaagctgcaggctttcgcttcaacaccagtataattcccattgatttatgactttccaacagtggatgattatttgtattgtcttgcagaaatgaatcaaggtatgaaacagtacatgggagaaccacagagtgaggcttggcgacaactacacagctatgtcaaggaacatagttctcacaagctttccgatggttctgtcgttattcgattgaacattatctcgattggcattgaatccgacccagtagcataatatacgcattgtgtgttctgttcgagaaaattggttgctatgccttgtacaacggtgaccaagcactttgttatgtaagttacaccaagaacttgcacagaaagattgcctttcacgccaagttgcaaccagacaattgcaaatttttcaaagcctttgtcg

SEQ ID NO: 4540 - DNA, 394 bp, Cyanidium caldarium
  Clone ID: LIB190-040-Q1-E1-D9
acgcgtccacccacacgtccgcccacgcgtccgcccacgcgtccgcttgggcacagattgagttgcgtgccacgaattatgaagaagctgctcgtctcgtctctttggtggagccattggaacctaccaatgtgtatctatggcaaacctatgctcagatagaaagtgctcagggtcatttggaacaagcctatcattactatttgaaggctcttgagttggatcccaacaatgtagtagttatggcatgtctggcaaaattggaagcgaaaaagggtaatgttgatgaagcaaggagtatttttagaaaagctattgagttggacgagaaagtgcccgtatatatgcatgttgggccaacgtagaactgtgattgaacaatatggatagagca

SEQ ID NO: 4541 - DNA, 372 bp, Cyanidium caldarium
  Clone ID: LIB190-040-Q1-E1-E1
cggtctagaaaatccgggccggcccacgcgtcaggacatattggatagggaatgtatcgatgtatacgatgtgaacagtctaatgtattaaagtgcaaggaatcacgagtaaggtctagcgcgacgtgtgggttcttgcgatataaaacaaggattgtacagcacttgcagactgtcctcaacgcaatttgctgttgtggtagacagtaagttacgaacagtatgtgacgacgaaaaaatggtacaaaacaaggcggtcactctaaaggatactagcttacgtagtcgtgcatacgacggtctaaatcgtaaagattgacacgtagatacatttcaatagctgtcatatgagtacattatgactggaaaaac

SEQ ID NO: 4542 - DNA, 411 bp, Cyanidium caldarium
  Clone ID: LIB190-040-Q1-E1-E10
cgggccgacccacgcgtccacccaagcgtccgcggacgcgtgggcgcaatgacggttaggctttcatcttttcgttttttcttctttggtttttactgctataacgcggtgctcaagaaacttagagtgaatccgaaccaaacgagcgaggttttgctgtgacagagcgataaggaagttgaagtggacagacgtcttttgttcttttcactgcccaacaagtgcaaaagagatccgctcctgccataggacaaaacaactagtcactgagtacaacgtgcgtcggcgcagggcattctagcagcactatactattcatgagctagtacaagactacgccataacagcctcgttcgcagaatagtagaatttttctgcaaacaagctttggggacagaggagacaacagag

SEQ ID NO: 4543 - DNA, 439 bp, Cyanidium caldarium
  unsure at all n locations
  Clone ID: LIB190-040-Q1-E1-E2
gggccgacccacgcgtccactcattgttgtgtcgtgcatgttaaaggaataagtagttattattgatatggaggctgcgttaagtgcagttagtgaaaagtgtgggacagagtttaaaaactttcagcactgtgtagcagcaaatagagataactgggaggaagtttgtagacctcagaaagcagactttgccaaatgtacttctgaaaatatgcagtttatggacttggtacgagagggttgtttcttggaaattcgtcaatatgaaagatgcctcaaggaaaacaggacagaaccaaccctgtgtgaggaaaaacgaaaacaagtcttggactgtggcgacactgttattcgcaacaaccaagaagactcggaaaacactccatagaaaactatctattatgcaacaacagtgtgttattccatanagaaacgaaca

SEQ ID NO: 4544 - DNA, 462 bp, Cyanidium caldarium
  Clone ID: LIB190-040-Q1-E1-E6
ggtaccagtcaggaattcccgggccgacccacgcgtcagcccacgcgtccggttagatattgtgaaagatgggagtcaaagttggtattaatgggtttgggagaattggaaggctagttcttagagctgctttggagaaacagtctgtagatgtggtagctatcaacgatccctttattgatttggactatatggtctacatgttcaaatatgactctgtgcacggcgcttatccaggtacagtggtagcaaagaatggaaaacttgtcgtggatggacacgaaatggcagtgtttgccttccgtgaccctagtgagatcccttggtcctctactggagcagaatatattgtggaatcaacaggagtatttactgctgcagataaagctcgagcacatatgaagggaagtgctaagaaagtaatcatttctgctccggtcaacgacgctcccatgtttgtga

SEQ ID NO: 4545 - DNA, 392 bp, Cyanidium caldarium
  Clone ID: LIB190-040-Q1-E1-E7
attcccgggccgacccacgcgtcagcccacgcgtccggttacatatcgtgagtaattgaagtcagcattagtggtaacgagttggttagaatgagtaggctcatgcgtaggaatactttgtggaagttagctgtatgtatatgcaactgacaccaatctcgttaatgatttagtcgagaacgacaacatggtcatgcgttaacactggccataggactgatcgaattgcagttgaatcatttgatactgtttttatcgtagatgagaaccaagtggtagtgtatgccttccgtagacctactatgattccttagacatctgatggaactaattaaagtgttaaatcgagtagtatagttacagctgcaagtaagactcgagcatataatgaa

SEQ ID NO: 4546 - DNA, 365 bp, Cyanidium caldarium
  Clone ID: LIB190-040-Q1-E1-E8
aattcccgggccgacccacgcgtcaggaagaagaagccatccaaattgccaacgatacttcgtatggtttaggtgctggtctgtggactcgagatattatgaaagcttatcgcgtatctcgagcaatcaaggctggtcgtgtttgggttaactgctatcatgagtatccttctcatgcggcgtttggtggttataagaagtcagggtttggtcgtgaatgccacaagttgactttggagcactatcaacaattgaagaacattatcatcagttactcaccacaacccactggtctgttttaagtttgagattggagggtttgttgtttgtttgtgtgagtgttataaagaatcatgtgttggtgt

SEQ ID NO: 4547 - DNA, 400 bp, Cyanidium caldarium
  unsure at all n locations
  Clone ID: LIB190-040-Q1-E1-F2
cgggccgacccacgcgtccacccacgcgtccgcgtggttggcggagttatgcagtggatcttccaccgacttggaaatttctgctcaagcagttgggaatacgtttgaaggttggggaacgtcccttgcatggtttgccaatgtagttggtaagggacctacagaacgcaaggagcgaatggcagaccttctttttgacgaacaacagggcctacgtttgaatattgttcgttacaatattggtggtggagagaatccaaatattcccgttacactcgaacctagagcttgtatccctggtctttatactagtgcccatcaagttaattctctttcactggaacaagatagcggccagttgtggtttttacatgcagcggtganaagaggagttgacaag

SEQ ID NO: 4548 - DNA, 441 bp, Cyanidium caldarium
  unsure at all n locations
  Clone ID: LIB190-040-Q1-E1-F4
gggccgacccacgcgtcagtggagaggatgcttgcctttgtgaatacaaatcttgttctccagagatccttgaaaaagtcgtctgaatcgttttgtaaacagtgttgtttccaacaaagaagtcttctatcgacaaagaagtttcgtcaactacgagttcgaatatgtgttacgaataccctcttctgtagtttctcagaagcaccagttgacgagatagatgaaacaattaaagaagctcaaggtactgaactttcgcgagctgattccgacttgttaaagtttgccttgatgggaaatattgtgggagtacaacaagcacttgcagctggcgcgaaagctggagttcaagacaaggaatgacgaactgcgttacacttggctgccgctattggtgttcatccttangtgaaataatattacaagctgctggagatctcg

SEQ ID NO: 4549 - DNA, 247 bp, Cyanidium caldarium
  Clone ID: LIB190-040-Q1-E1-F6
aatgcccgggctgacccacgcgtcagcgtggcagccggaagctttgtgatatggtggtcattccttgccttgtttatattcaaaaacagatcgctattaaactatttgaacaatttgtacaagaagaagaggaaagatatcaactcaataaagtagtatggcacttgtatcattcctaaaaaaaaaaaaaaaaaaaaaaaaaaaaaaaaaaaaaaaaaaaaaaaaaaaaaaaaaagggaggaagcac

SEQ ID NO: 4550 - DNA, 375 bp, Cyanidium caldarium
  Clone ID: LIB190-040-Q1-E1-F7
aattcccgggccgacccacgcgtcagagataatgcgctggcacaacgttggtatcgattggaagccatccgtgcggtcaaccaagctatcggtcgagtgatacgacatgagaaagattttggtgcgattattctttgtgatgaacgtttttgtagtatgtctcaccaactttctcgttggatacagccatttgtacgtcattattcttttggacagttgcaatccaacttgcatcagttttttaagcgtcgagtatctggtggaaagaagagaagtgaacaaggagaggtgttgtcttcatcctctccaaagaaaactcccaagttgagtgcgggagatgaagcatatttatttcaagccatgggaatggagcct

SEQ ID NO: 4551 - DNA, 362 bp, Cyanidium caldarium
  Clone ID: LIB190-040-Q1-E1-F8
gtaccagtcaagaattcccgggccgacccacgcgtcagaagccaacagcagttgagcacagcaatatcgatatgtcaagtggctggaataactatagtggaacggcaggcaatgggaatgctggtgctggtcaagggaagaacacggataagaagaccagtggagaacttgcaaaagatagtttaaacgggttgggaatggcagccttgtcagcgggtaagctggtttatcgcggtggcaagtggtgtgtggataaagtggaaggcgccattgacgaccacaagtcaataggaagtaagagtggctgtggtggaaattcacgttattctcgttgaaacgtaataacgtggatagaaacagaa

SEQ ID NO: 4552 - DNA, 405 bp, Cyanidium caldarium
  Clone ID: LIB190-040-Q1-E1-F9
acgcgtccactttaggatcggcaacgcaattccgagaaagaaaaattgttgaggcacacgagtgtcgttgctagtgctataggatggtagtttatcgaaagggactagtaaatatgttacaaaagtctttaaaagagtttaaagatgctgttcgtcaggagaaaatcaaagaggacttttctaaaagcgaatatcacgttacaaagggagagaagattcgtgccaatagacttcaagcacaatatgcaagaaaggcaacgaagacttggaatatgatcaatacgctgttggaaagacagtcgagaggattctaattggatatttgtatgtggaggagctaaggaagaaggtgataggacaagggttgtatatctatggtgatagttgtggtatctagttgtgatg

SEQ ID NO: 4553 - DNA, 385 bp, Cyanidium caldarium
  Clone ID: LIB190-040-Q1-E1-G11
acgcgtccagacaaatggccaacgctggtcaagatggccttgtgcaagtcaacaaacatagagaagtaaagagattgcaagaagataatattttgaatagagcactatcacaaccaggagatgtatttctgtgcttttgcaacatccagttgttggtgaatgcagaaagagctattataggaaatattacttgtccagaaagtatcgaattgtgtcgtctattagctggacatatagcggtttggttcgatgaacatttggatgactttcgtttggaagctatcttgggagcactagtgtgtacttgttactgtgagtggaagcgttttgaaggagaattgggggtacaagaatggaatgaattggacaagatatcttccctaga

SEQ ID NO: 4554 - DNA, 83 bp, Cyanidium caldarium
  Clone ID: LIB190-040-Q1-E1-G2
cggtcaagtatccgggccgacccacgcgtcaaagaatatcctccgggtgggtgaaaagttggcggtgggtggacttaatcaat

SEQ ID NO: 4555 - DNA, 440 bp, Cyanidium caldarium
  Clone ID: LIB190-040-Q1-E1-G3
gggccgacccacgcgtcagaaaagttcaaatattcattgtgtacctgacagtagaactgcattgaatggagaaaaggattgtagacgtgccttttgacacatgatatagaatgactgctgctgccgtattcactgcttcttgagctttccaatgtcacttggctccacaatcctagataggattctttgacaagatatgtagggtatccattcctcccttatccatcctcttcctgataatggtcacccaaaggttgctttcaaccaagtactctgtgagaacaattccgaagtgtttttttaagaagaaaatttgtggaggcggcctgaaagctttgactcggctctgggtcgatacagaaagcatggcaaaatttttaggatgaagaacaaaagcaaggatcgagacgaggatctattgtcatcaatgcaaaacacga

SEQ ID NO: 4556 - DNA, 258 bp, Cyanidium caldarium
  Clone ID: LIB190-040-Q1-E1-G6
gtacaagtaaagaatgcccgggccgacccacgcgtcagcccacgcgtccgcccacgcgtccgcccacgcgtccgagggcttagggtggataccttggcatccagaagcgatgaagggcgtggctaccaacgaaatgcttcgaggagctggaagcaagctttgatccggaggtacccgaatgaggcaactctttatactgtctactgaatatataggtagataagagcgaacttagtgaactgaaacatcttagtaact

SEQ ID NO: 4557 - DNA, 445 bp, Cyanidium caldarium
  Clone ID: LIB190-040-Q1-E1-G7
aattcccgggccgacccacgcgtcagcccacgcgtccgcacggacgtattctaaaggatgatgttgtagaatatttgagcagcacaggaacgacgagcaagaagcaacagcagcagcaacaacaacaaacagaacagcaaaagccgaaaagtatcgccgaccagtcttcttcagttactccaagtgaggatagcgcaactcatagaacatatgaagatattccattgaataacatgcgcaaagttattgctcgtcgattgacagagtccaagtctcaagtacctcatgaatattgtcaaattcaatgtcaactcgataaggtattagagttgcggaatatttggaagaaggaaaggaatgtgtctatttccgtaaatgattttgttattcgagctactgcagttgcattgagacgagtaccagagttgaatatcgtttgggatga

SEQ ID NO: 4558 - DNA, 392 bp, Cyanidium caldarium
  Clone ID: LIB190-040-Q1-E1-G8
aattcccgggccgacccacgcgtcagcgaaacaagttgaatcggaagctattttaagagaactgctcgtatgtctcattcaacgtatgaaaggttcaaaggatatcaacttgctcttggcttttacagaaatgctcgtagaagcttcggttcataagagcaccattggtcatatcgctaatcaacgtctgatgttctacctgatacatccttttgcaaaagtgcgacaacttgtttccgacagactacaagttcaactgcttacctatgaagactactttgtagaactaatgggtgaggaaaactatcaacaagcgatacaaattttggaacaagtagaatgggataagacctccccatagaaactaacataacataggaatcgactttgta

SEQ ID NO: 4559 - DNA, 444 bp, Cyanidium caldarium
  Clone ID: LIB190-040-Q1-E1-H1
cgggccgacccacgcgtccagccacgcgtcaggtttacccatcaatcttctcagctctcatatggatgtggtccctgtagagactctaagttggtcaatggatgcatttgctgggatagtggaaaacggtacaatgtatggaagacgtactcaggatatgacgagtgttaccattcaatattttcaagcacttggaaacctattacagcgtggatggaagccagatcgaactattttggtttccgtagtgcccgatgaagagattggagggacgcaaggaatgggagtgtttgtagagtcggaagaattccagaaatggaatattggttttgaattggatgaatgattggccaatcctgactcttttatgtggttgtattatggtgagcgacagccttggtggttagttattggagctatcgatcagcctgcacatggagcaac

SEQ ID NO: 4560 - DNA, 375 bp, Cyanidium caldarium
  unsure at all n locations
  Clone ID: LIB190-040-Q1-E1-H10
gcgtcaattacgacccgctattcccgatcgtggttttgccacttccatacatttggggagcagggagacgcacggtcgagttgatgacgatcgaaagccacaaatggaagcggcaattgtacgtattatgaaggccagaaagtatttggaccacaacaatttggtgtccgaagtgattagccaactacaatctcatttcgtgccggaacctgcagaaattaagcgaaggatcgagagtttgatcgaacgcgagtttttagaaagagataataaccaaaaaagttatcgttatattgcgtaagaagctatttgtgtgctctgtaggctgcacaggtagaagataaaggagagcatgttttttttacaaaccaaann

SEQ ID NO: 4561 - DNA, 433 bp, Cyanidium caldarium
  unsure at all n locations
  Clone ID: LIB190-040-Q1-E1-H2
cccacgcgtcagaccactccaagaangtgttgcacggctgtcgaaagaacgtgctgtgaagtgagagaacgtacgagaaagccaagtgaggaaaagaaggcaagtagagggcggcccgagaaaggagagggcgtaagacgtgatacagagtaagaagaaaagagaagagagctagaaaggaggtaaaagaagagtaaaaggactagaagaggtacggaattcacgaagaaggagcgtgaaggaaggaggaatcccaagtaatcgaggaagaaaaagcttcggtgaaagcgtgaacggattttgtacacactgcccgtcaagttctggaagtgtgctaagaataagcaagagaagtagaagagagtaagaaaagaagaaaggaagtgaagacgtaaaacgtgtgtagcaagcgtagagcagaagaactgggtgt

SEQ ID NO: 4562 - DNA, 287 bp, Cyanidium caldarium
  Clone ID: LIB190-040-Q1-E1-H6
acccacgagtcagaacacatgcaagtaggtaaagcgaacgggtgagtaaagaggtgtgaaagagtggaagaacataaaaggactagaagaggtacggaattcacgaggaaggagcgtgaaggaaggaggaatcccaagtaatcgaggaagaaaaagcttcggtgaaagcgtgaacggattttgtacacactgcccgtcaagttctggaagtgtgctaggaataagcaggagaagtagaagagagtaggacaagaagaaaggaagtgaagacgtaagacgtgaaacac

SEQ ID NO: 4563 - DNA, 372 bp, Cyanidium caldarium
  Clone ID: LIB190-041-Q1-E1-A10
attcgagctttcgcagatgcgttggtagtcattccatacactttggccgagaacgctggcttaccatccatagaaatcgttacggaactgagaaacaaacacgtacaaggagataagaatgcaggaatcaatttcaaaaagggatgcataagtaatatggctgaggaaaatgttgttatgcctttgcttgtgacagttagtgctttgaggcttgcaacggaatgcgtccgaatgattctgaagatcgatgatattgtgatgactcgctagaaaagtccttggtgctatttggaaaataaaaaggttcatcataaacaaaactaatgataactggtaatcctcaaaaagctatataaataacgtatgcaggaa

SEQ ID NO: 4564 - DNA, 385 bp, Cyanidium caldarium
  Clone ID: LIB190-041-Q1-E1-A6
cgggtcgacccacacgtccacccacgcgtcggtgcagatgcagctgtcaaacataccgtcaaagccgatgttggaaggattgtcggtagtacaccatgagctccccaggaagagatagctcgagtgaagacacctttgcgcgatagcacactatctcgcgtacctggagacactggaccaaggattttgaagcctggcggctgtaacattaggaataagccagggtatattcaatcaccgggttagaatggtgacgcacatgtgcagtgcggacgtacatatgaagctgtgactcacactacgtcacatgaacttggtcagaggaatgttaccgcagtaagtgatgctacatatgagtcgacttccataatggacagttttgaga

SEQ ID NO: 4565 - DNA, 442 bp, Cyanidium caldarium
  Clone ID: LIB190-041-Q1-E1-B2
acgcgtccagtcttgacaaaactcgaaaactatttatttcttgttatttttttagaggtttttctagagtgtgttttttggagttgttgtactccagtcttggtggttggtgaaaggctctagtgacaaagagggttgttactttcccgccattctccacagctccaaccatcaacttgtatacggacacatatacataactatgttcgtacatagtcgtggtgtaaaaagcgacaattcgaatggttgcaaaggcttgatgaaaagcaaaggaccagtgaaggtgttagagaaagcacttgaaaaagggggacacttccgtgtatatttgtgcccctagtaactaactaattcctcttgaagatattgcaagtttggtgtactaaacacgaattgcaagtgttagtataagagagtgtgtacgtgtgtgtactgtgttttt

SEQ ID NO: 4566 - DNA, 448 bp, Cyanidium caldarium
  Clone ID: LIB190-041-Q1-E1-B6
gacccaagcgtccaggtatctgcggtagaacatatgaaagaagcagcaccgactgtttagcaaaaacacagcactctgcagaaaagagaaaatgtaaagtatagagtgtgcggcctgccaaatagtagagaagaaatcgatgaaagtgaaagcgagtacaagatgaggtatagagaatggcggtcctaactgtaaggatccaaaggtagcgaagtaaatagacgtttgaaaggcgtccagtatgaaaggagaaacgagtgtagcactgtctagtcgtccaactcagcgaaacagcaataactgtgaaaatgcagtaaactagcagtaggacggaaagaccccataattcttgactagataggtttagggaggagagagaatcatgaagtagaggaggtggggtaagagatgaaagaccactgcatgaggataaagaatctaactgagt

SEQ ID NO: 4567 - DNA, 239 bp, Cyanidium caldarium
  Clone ID: LIB190-041-Q1-E1-B8
gacccaaacgtccacccacgcgtccgcccacgcgtccgatcattttcaacaataataataataatagtataataataataaaaccaatccctttgacaacaaaaaaaaaaaaaaaaaaaaaaaaaaaaaaaaaaaaaaaaaaaaaaaaaaaaaaaaaaaaaaaaaaaaaaaaaaaaaaaaaaaaacaaaaataaaaagacaaaaaaaaacaaacacaggtgcaaacaaaaagaaaaacc

SEQ ID NO: 4568 - DNA, 422 bp, Cyanidium caldarium
  Clone ID: LIB190-041-Q1-E1-C1
gtcgaccgacgcgtccgaccacgaatccgcccacgcgtccgctcattgtggtttctgccatggcgaaaggtatactacaggatcgtcttgagaagcttctgccttataatcagacctggtatttttatataaccaagatagtattttacgtatgcacttttattttctctgtcgtcattgctgctctggtcagtaacgcagagtttaatatatttgataaatccccaccgaatattcatggagacttttgtgcatacaaggcgtcactagctgagccagctggcgtgactgccatttgcaagtacctcatagcagtaggtgctcttggccttgtgtttgctataaggtttgttgcattctctctatggacccttttggcacatcgagtgattgacttatggtgggtcgaagccttgttgaat

SEQ ID NO: 4569 - DNA, 454 bp, Cyanidium caldarium
  Clone ID: LIB190-041-Q1-E1-C2
ttcacgggtcgacgacgcgtccgagaatactatggcaagtcttttggagaatcccggtgtccaacaaatgttgcaaaatatgttttcagatccttccactgtagaatctgttcttatgagtaatccccagttgagacaaatggtggaatccaatcctcagatgatgaatatgttgaggaatccagactttttaagaaccatgtcgaatcctcagtttttgaggactatgtttcagttacaacaagcctttcagtcgagcaacccaactagtacttcctcctcctcttatccatccagtaataataataataataatacgaatacttttccatccaattcatctggtgctaattatatgccagatatgagtgcattgttttctcttttaggtgccaacaacaacaataccgcatcctttgtagattcagctattgcgaatatgactcaagaacag

SEQ ID NO: 4570 - DNA, 438 bp, Cyanidium caldarium
  Clone ID: LIB190-041-Q1-E1-C4
ggtcgacgacgcgtccggaaataacagaaaaacttgtcttatggcaacatcggggtgttttgtgcgccaataacagcgttgagtgcgcgcaacacgtaatgccgatgtccgaatcactcaattgcatagttgcgtgaacaaagtgaagatttcatgcgaaggaggacaggctttagttacttattctgtaccaaaaaagcatggatagaactagagcctggaattcgtattggactgcatgcattaacaaaatttccaatctaatgaagagatgttcccgttgtgtatccaatctagagagtaagggcttcgctctataccaaaacatggatatctttagagtctggagtttgccgtttgctagttaagagtcctctctgtgattcctgacgctgatgccgtcctcctgtatctctcttgagggatggtgcaaaagac

SEQ ID NO: 4571 - DNA, 445 bp, Cyanidium caldarium
  Clone ID: LIB190-041-Q1-E1-C5
ttcccgggtcgacccaagcgtccagaaaaaggtaagaaagaaggaaaaggaaaaaaaaaaagggaaggttaaaaacaacaaaccaaaaaaggaaacctttaagcaataaagaaaagaaatcccaaaaagaaaaaaaaaagggtaaaaagaaggaccaatcaaggttaaaaggtaaagaacaagaagaaaaaaaaaaattccgggttgaattaccaaaccagaaaaaggaaattaaaaggtagaaagaaggaaaggttaacaaaaaaaggaattaaaagaagaaaattttaaggcggcttcatattaaaattccaaaaggattaaagaaaagagaaaagagaaaggaaagaagaaaaaaacccttctggagaacgacaaaagttatccaagaaaaaaggaaacccaatttaaggtaaaaaattggccaataaggacttaggcaaaa

SEQ ID NO: 4572 - DNA, 418 bp, Cyanidium caldarium
  Clone ID: LIB190-041-Q1-E1-C6
attcccgggtcgacccaaacgtccagaattgtgactccaaatatggcaagtggaaccgctgatgtaggtctgataggcttagctgtgatgggacaaaacttggtactgaatatgaacgaccatggatttaaagtagcggtttttaacagaactgtctcaaaagtagacgactttcttaacggagaagccaagaataccaacatagtgggggcgcactcgttgcaagagttttgtggtcttttgaagaaacccagaatcattattcttcttgtcaaggcgggtgaagcagtagatcagtttatttctatgctcgtgccacttttgtctagtggtgatctcatagttgatgggggaaactctcactttctggacaccagacgaagaacgaaagaacttgaagctaaaggactgcttttta

SEQ ID NO: 4573 - DNA, 446 bp, Cyanidium caldarium
  Clone ID: LIB190-041-Q1-E1-C7
ccgggtcgacccaagcgtccattccaattgagctcttttcttcgttggttggtgtgtggtgacttggatgaaaacttatctctttgttccgtcttgttcttgtctttctacaaaacttgcaagtggaaaacaagtagcagttgattcaagttggaaaagatgtggacagttcaagggaaatcgttccttcctccatgctgctcctggcactcttaacaaagcaaggtccaggttttctgtttccatgaaaaccgaagcttgggtaaagttgataaaaactgagcaactaaagccgggagacttgaaaccttttttcgttgctggccagtctttgctagtagtatgtgactatgacggtcaagtatactgttctgccaacgtttgtccacacttgggaacaccattggattaaggaacggtatctagtggtaacttgatatgtgccc

SEQ ID NO: 4574 - DNA, 291 bp, Cyanidium caldarium
  Clone ID: LIB190-041-Q1-E1-C8
acccacgcgtccgcccacgcgtccggtacattcaacatcatcaaatgccaaagggaggaaagaaagattcttcaaagaaagaagccacaagtaaacctgcagcagcagatgctacaaagacgacagaaaagtctggtccggaagccaagttgaagggaactggtgcaaagaaacaataaaaagttgactatgcatgttcctgttatgttttgtgagttctgtttgatagtttccagctattcttttggtagtgaataaagagaaaattttttatatttaaaaaaaaaaaca

SEQ ID NO: 4575 - DNA, 134 bp, Cyanidium caldarium
  Clone ID: LIB190-041-Q1-E1-D1
cgtccgctcgacaaccaccaatactactagcaacgaaaagaaggataaattgagaattagttttcacgagtttcaggtactaaccaatcgaatagctctattcttaagacgaaacgatgcagaaggagttgctg

SEQ ID NO: 4576 - DNA, 255 bp, Cyanidium caldarium
  Clone ID: LIB190-041-Q1-E1-D11
aaggaggatccaccctaacgtatccatgcatactacgtcataactcttctaaagtgtcacccaaattcaattcacaaggtcgacttattagaccttcgttactgaaaaaaccctggggtaaaccaccttaatcacctagcataacatccccctttcacaacccgttttaacaaccaggaggaccacacaaatggcccttcccaatagttgttcaaacaaattggcaaatggaaagcgccatgtaaccgcccatta

SEQ ID NO: 4577 - DNA, 455 bp, Cyanidium caldarium
  Clone ID: LIB190-041-Q1-E1-D5
ccgggtcgacccaagcgtccacggacgcgtgggcggacgcgtggggtcgagagggaaaaagcccagaagccaagataaggtatcaaagtaaagaaagaaggaaaaggagaagaagagagggtaggcttagaagcagcaaaccagagaggaaagcgttaaagcatgaaagaaaagaaatccgaaaaagaagagaaaaaggtaagaaagaggaccgaatcagggtaagaggtagaggagcaagaagagaagagagaatgctgggtggagtagcgaaacaagagaagggaagtaaaaggtaagaaagaggacaggtttacgagagaaggaagtagaaagaagagagtgtaaggcggcgtcataatagaaatccgaaaggagtagaagaaaagagagagaagaaagaaaagaagagaaaagccgtactgaagaccaacagtaaacaattggttttacac

SEQ ID NO: 4578 - DNA, 459 bp, Cyanidium caldarium
  Clone ID: LIB190-041-Q1-E1-D6
attcccgggtcgacccaagcgtccagtgttttggattgcccttgtcgtctatcatagacacacgttaaccttggtccattactactaggaatgacccttcgtaaaccagtctttaccaaagtagaaaaactacaacccgggacacaggggcacaacttgatcgttcaagtgatgaacgtcggtgaggttatggaaaaagtgagaccgagtggtgacaaactgcaaatcgccgaagtgctacttgcagatgaaactggagcggtattatttacagcaaggaacgaacaaatcaaactttttaaaaagggagagtgtgtgaccgttcgaaacgcaaaagtcaatatggtgcgaggctttattcgtttagtagttgacaaatggggagctattaagccgcctggaccaacggaaaagttacaatggacaccaaaagttgaaaacaatattttcaacatagaa

SEQ ID NO: 4579 - DNA, 215 bp, Cyanidium caldarium
  Clone ID: LIB190-041-Q1-E1-E11
acgcgtccgaccacgcgtccgagcattttcagcaacaataattggacttgatggaaggaaggcagataacatatggaacgatgccctatattatcatggaaaagtggtgaacttttgtgcatattcggcttcgtctgtttttgaaagtggcgaacatggcgcatgttaatatgttatggctttggcttctaacaacttgattttagttttccttc

SEQ ID NO: 4580 - DNA, 343 bp, Cyanidium caldarium
  Clone ID: LIB190-041-Q1-E1-E2
ccgacccgtccgagcgccaactctaggcaaactttgggtttatccttcgggagtggtttttctaggtgcagctgttgttttgtatggtttgcaacacgataaattgccactagagagagtccagtttgcaaaaaccttttcaaagcccgtttcaaaagcagataatcaagttgttcgagcaacaccggaagaatgcgattgtcttccgctttggcagtgtatgactagtggccaagacgactgttctcaacttgaacgtgaactgaggctctgtatggaacgaaacaagaagcgttctgctcaagtgtagataagtgctttcaataaatacaagttgttttct

SEQ ID NO: 4581 - DNA, 330 bp, Cyanidium caldarium
  Clone ID: LIB190-041-Q1-E1-E3
acgcgtccagatcatatcccctttttgtttgtttatcgtttgtcaaagtttggttgttttcttggtagcagttgtacattcaacatcatcaaatgccaaaaggaagaaagaaagattcttcaaagaaagaagccacaagtaaacctgcagcagcagatgctacaaagacgacagaaaagtctggtccggaagccaagttgaagggaactggtgcaaagaaacaataaaaagttgactatgcatgtgcagtcctgttatgttttgtgagttctgtttgatagtttccagctattcttttggtagtgaataaagagaaaattttttatattt

SEQ ID NO: 4582 - DNA, 433 bp, Cyanidium caldarium
  Clone ID: LIB190-041-Q1-E1-E6
ccgggtcgacccaagcgtccacccacgcgtccgaaccaataaatcaatgtcgtcttggtgaaagccttccacgccaatggaatattaaaagtggcgactttatcaagggaacatcaaacaacagcaacaacaacaacatcaacattcgctaccacaactagagaataataaaccaagtcaactgggtagtatttcggtataaacgagagaaaatattattcccacgggcaaccttgctctagactggacaacactttcggacaacttgtcattgttgtctcatcacccttcaaaaactacgagtaattaaacaacagaggaacagacggttgatattggaagatcaaaccaacatcaacatcaacaaccgtataccacaccgatggaacatttgactgtgccactagacattactttgaaaaacgccatcaag

SEQ ID NO: 4583 - DNA, 257 bp, Cyanidium caldarium
  Clone ID: LIB190-041-Q1-E1-E7
agatttgtcggattgacttgaaaaagaggaagaatgggaaaggttcacggttctcttgctcgtgctggtaaagtacgaggtcaaacacaaaaggttccgaaacaagaaaagaagaagcgtccaaaggggagggcttggcaaagactcaagtacaataggcgttttgtgagtgttgttgttggttttggtaagagaagaggtcccaacgccaactcgtgaagcgactgcaatgataaagacaatactttacagcgttt

SEQ ID NO: 4584 - DNA, 433 bp, Cyanidium caldarium
  Clone ID: LIB190-041-Q1-E1-F11
ccgacgcgtccgaccacgcatccggagagaatgctgggtggagtagcgaaacacgagaagggaagtaaaaggtaagaaagaggaaaggtttacgagagaatgaagtagaaagaagagagtgtaaggcggcgtcataatagaaatccgaaaggagtagaagaaaagagagagaagaaagaaaagaagagaaaagccgtactgaagaccgacacaggtactcgaggagaaaggagacccaaattaaggtgagagaatggacgataaggaactaagcaaaaggatatggtatctgcggtagaacatatgaaagaagcagcaccgactgtttagcaaaaacacagcactctgcagaaaagagaaaatgtaaagtatacagtgtgcggcctgccaaatagtagagaagaaatcgatgaaagtgaaagcgagtaaaaga

SEQ ID NO: 4585 - DNA, 459 bp, Cyanidium caldarium
  unsure at all n locations
  Clone ID: LIB190-041-Q1-E1-F2
attcaagggtcgaccgacgcgtccgatcgacatttttaatttgcatgtatgagggtccgttagaggacaacatgacgaggacgcctcggcattcatataaataaactatttctgcaccaaaagaatagttaaggatctangccacaaattaacagggtaagggtatgtgcagaaccgttcaagtgcgaattcgaggctttagggctatccttattttggatagagcttggttctcgctccacatcaaaattccaaacgatagtaaaaacaaatagtttggcatccgcttgaatctttcaatacccctatcttatcattgtaatgaaggattttgagttgttttactggggtggaagatcagaaggaagaatggtttctacgacagaagaatatcgcatggattaactacaagtgaagatgattgggaactcttttgaaacgctatgacagangatatac

SEQ ID NO: 4586 - DNA, 427 bp, Cyanidium caldarium
  unsure at all n locations
  Clone ID: LIB190-041-Q1-E1-F3
ttcacgggtcgacgcacgcgtccgatcacgagtccgatgggacatgtagtgggatgttgtgttccggtgaatgacggggaagctggagaatgcaaatttttaagcgttcattcgacgtttaagacgagataaaggtctangtccctaaatgtggcatatagaggtaagtgcagaattgggatactgcgtaccgtgagacagtggaggaagctggagtatctggaaagattcgttgcaacttgggcaagtggataagctcgaatgatcaaacattgattatgtacttgctattagtagatcaagaactgacacagaatgataccatatgggaagagaggaatgagcgacctcggagatggttaacgtgtgacgaagcatcgaagactattttgcatctggagagtggtattcgaatgcctgagctatt

SEQ ID NO: 4587 - DNA, 305 bp, Cyanidium caldarium
  unsure at all n locations
  Clone ID: LIB190-041-Q1-E1-F4
gtccgatcacgcaatccgacggacgcgatggggtatatcgatataaaaacgggtaatttgacagaanatgagagaatggaaagttttaatggttcattcgaagtttaaaccggaaatatggttgggtcccaaacgtaacatggcgggcgtacaaaaggattaagacttatgtctgccgtcatgcaatgtgagaacccttcttaactgtcaccaatttttatttcactgtgcacttgttttaaaacgtcgtgattgggaaaaacctagggtttgccaaataataccccttgaactgaatgcccctt

SEQ ID NO: 4588 - DNA, 428 bp, Cyanidium caldarium
  Clone ID: LIB190-041-Q1-E1-F5
cggtctagaattcccgggccgacccaagcgtccagtggcatagagaaaaaagaaaagaattgggatgctgcctgccgtgaaacagtggaggaagctggggtatctggaaagattctttgcaagttgggcaagtggaaaggctcgaatgatcaaaagttgatcatgtacttgctattagtagaacaagaactgacaaagaatgacaccagatggaaagagaggaatgagcgacctcggagatggttaacgtttgacgaagcagagaagactattttgcaagtggagagtggtattcgaaggcctgagctattagaaatgcttttattagcgaaagcaagaatattgactttggacactactccagagtcttattccacagactcttctcctgaagaggagaataacgaaaaggaattttaacgtgttgt

SEQ ID NO: 4589 - DNA, 453 bp, Cyanidium caldarium
  Clone ID: LIB190-041-Q1-E1-F6
ccgggtcgacccaagcgtccaataatatttgcatctttttggactttggatttgcacgtgtgggtgtgctcagtcagaactgcttctcagttagttacgcaatatgcctagtcataaggaacaaagtacaggaattaaaatatcagctgacggttacgcactaaagttgagcggtattcggttggacgtagacggcagtttggtcactatggtggacgcagacgacctcagagccctcatgtttacggaaagcctcaaggaaaagtcaaagctgcatgacccaaaatttttcaaaagctattatgaggagaataaggactacttttattatatgactcatacggagaagaaaatgtatctttctctggaagttgcacgagaatacgctactctggtgggaaactcgtttctgcagaaatatttggacaaagtcattgagcacgaacacgcata

SEQ ID NO: 4590 - DNA, 429 bp, Cyanidium caldarium
  Clone ID: LIB190-041-Q1-E1-F7
tcccgggtcgacccacaacgtccacccacgcgtccgggcgtttggctatttgttacacacacacacacatatatatatatatatatatatcgttattgccatcttgctgccgatggcttctcgtcgagattggaaagatatagctggagccggttcttcttgtttcttgtcctttttagcacgtattttactattttctgttgcccagttgggttgggagttttttcgttcaacgccttggagaacaatattggaaggaccgttgtgttgtcttttcaattcattcggtttggttggctttggaaacttggaaaattgtttggttttcaaacaaataccggtttatccaaaattggtaaaatttttggaaccaattttgggtttggaacttacaatacacccgttttttccaacaacttgttggtaatt

SEQ ID NO: 4591 - DNA, 446 bp, Cyanidium caldarium
  unsure at all n locations
  Clone ID: LIB190-041-Q1-E1-F8
acccaagcgtccagccatggaacaaaaacctattttatactcatactggagaagttcttgctcttggagagtccgaattgcgttggcagtgaaaaatatcgactatgaatacaaggctatcaacttggtaaagaacggaggtgagcagtggggatcggagtatgagagactcaacccaagtcacactgtgccgacgttggtcgtggacggtcatactattggtcagtcagttgccattatggagtacttggaagagacccggccacaagtgcccttgttaccaaaggacccggctcagcgagcaaaagttcgtcaggtagtagaaacagtaaatgcggatacacaaccactgcaaaatttgagggttctgcagtgggtacagaaggaggcangggaggaaaagagaaacgcgtggctacaacattttctgacgctcaatatacaag

SEQ ID NO: 4592 - DNA, 423 bp, Cyanidium caldarium
  Clone ID: LIB190-041-Q1-E1-F9
cgtccgcacacgcatcggcccacgcgtgcgcccacgcgtcggcctacgcgtcagcccacgcttccgcttggatgctacttcagttggagatgaacgtggatttgcacccaacattcatgaattggaggaaggagtggagttgttggtagaagccattgagaaggcatgacatactggtaaagttaagattggcatcgactctgctgcttcagagttttggaagtctgagcgttccagttacgatttggactttaagaatcctagttcttcagatgctcatctcaagtccactgaacaattattgaatttatatgaagacttggcaaagaagtttcctattgtttcctttgaagatcctttccatgaagaagactttgatggctttgcaaagatgacaaaagtgttgggaaaggactatcaaat

SEQ ID NO: 4593 - DNA, 448 bp, Cyanidium caldarium
  unsure at all n locations
  Clone ID: LIB190-041-Q1-E1-G1
ggtcgacgcacgcgtccgaccacgagtccgcccacgcgtccgcggacgcgtccgcccacgcgtccgcccacgcgtccggtcaccttttttaataaaacttgcatggctcaaacttcactangaggagcacaaacttgatctacgacagattcatctaaatctacagaaaatatgtcgtccaagtgaaggcttttcccattcctttccacttgagcgttttccttatctgactgagagttcccagcanatgatttggaaaaggataaagttgtggacaacggaacaaccgtctttgtatctgccgcccgtactgcacgtttgtcgggatgaccagactcggaaaatatattgcggagatgttcctttcctccaaacagtccaaagtcgacgtcgttctttcgttgctctgtgaaagaattcttgacgttacgatcgttcctactcaaag

SEQ ID NO: 4594 - DNA, 452 bp, Cyanidium caldarium
  Clone ID: LIB190-041-Q1-E1-G2
ggtcgaccgacgcgtccgaatggttaaattaagtattgggattagtgaggcaaatccaactgaacaactaaatattttctggtttgaagatgtggaaacatttagaacctgtcgatatcataagaccaggcacttggcaatgccaatgcacatcttgcggctcctttcggccttttgcaaaaagagtattcgcgatggaatatctttccacttctcgtcgaaaagttgctcggattcttctggtgaaaggtcccaaaacctgaatttcttcaactcgagagacacaagtcagtgatgggcttttaaagggtgaccgttcgttgccactatggaacccttgtgaaactgaaactttgcaactggactcgtagattgctccttagtacaagaaagaattcgcaaatcccgaacttggaatacttcctcgtcatcaccagacactaataaatgac

SEQ ID NO: 4595 - DNA, 408 bp, Cyanidium caldarium
  Clone ID: LIB190-041-Q1-E1-G3
attcacgggtcgacgcacgcgtccgattcacagttttcctctccgctttgttcatgttgaacacgagtatcgcactaacagttgggaagaatccttggcttttatgggttggcctattatcaacgatgggacccttaatgccctcaatttttacaagaatcagtatcccacaaatatgtacctgttgggggtctttacgtttggagagtcttttatggtagcaactatttgttctctgtttcgttcagctggacttggcgtcatcgtgtttgacgcctttctacttacttccttggtattcacgagtctcactgcttattgtttctacagtaagaaggatttctcgttccttggaggctttttatgggctggattgctctgtctgttcggtgctgcaatgataaatat

SEQ ID NO: 4596 - DNA, 406 bp, Cyanidium caldarium
  Clone ID: LIB190-041-Q1-E1-G4
ggtcgaccgacgcgtccgaggacgagtgggcggacgcgtgggtggctagtggctccaagagcaccaagtccaacgaaaaagtccaaatcacattagaacaagatgaagagtttcgcgaagcttttacgttattcgacacagacggggatggtaatatgagtaaaggaactcggtacggtggtccgttccttgggtcagagtcctacggaagcagagttgaaagaaatgatagcagaagttgacaaggatggaaacggcaccatcgactttcaagagtttctcgacttgatgtccaggcatatgagacaagcagatacagacgaagagatacgtgaagcgttcaaagttttcgataaggatggaaacggttatatttctgccgcagagctgcgtcatgttatgacca

SEQ ID NO: 4597 - DNA, 373 bp, Cyanidium caldarium
  Clone ID: LIB190-041-Q1-E1-G5
ggtctggaattcccgggttgatcgacacgtcaaggcaagccacgctttatacgtctcggtttatagaaaaagacctttttattgggtaggcttctaagcagccatgtaataatgctgtcttccgcacatggcattgtagtatttgcactaactcgaacttacgtcagatttccggttcacacatggtcgccagtagcagaacagctggaggtgacacacttttggtgaagtagcgacacaagcaaatggaatctgaatcgaagacacagggggagtctacgaaaccttgtagtgttttgttaattatctacggcagcctcataatgcaattcgtacatgagtacgttattaagagtcaatccaggaatgactc

SEQ ID NO: 4598 - DNA, 415 bp, Cyanidium caldarium
  Clone ID: LIB190-041-Q1-E1-G6
ccgggtcgacccaagcgtccacgcgggaatacagcgaagagtcgtcgcgtaccgagtcgagtatacgaaagatgacgacgacaggtggtaagaaagcgtagcagcgatttgttcgtgtatacaaaactttttacgcgacactaggaagaaaacgtactcgaaatgtggaagacgactaggggatggacaaagatatagatatatatctatatatatgtagacatgtgtttattggatggtttgtttttggtgtctatttttaatctgtctttatagagcgataaagaatacgaaccaacgtcaaactaaaaaaaaaacataaaatgaatacataaataaaaatcaatccagaaaaaacatcaaaaaaaaacctataggtaatgtacacaagtgaaaaggggcggacgctctacag

SEQ ID NO: 4599 - DNA, 454 bp, Cyanidium caldarium
  Clone ID: LIB190-041-Q1-E1-G7
tcccgggtcgacccaaacgtccacccacgcgtccgcatcgtgatgccgaataatgtgtctgcagtgaaacgaagtgctgtagagtcttatggtggaatagttgttttatgtgaaccaaatctaccagctcgggaatctactgcagaaaaagttgttcgggaaactgggggagaatacatacctccatacaatcacgtagatattattgcaggccaagcaacggttgcagcagaactattggagcaagttcctgatttagatgccattattgctcctatcggcggtggaggactcgtgtctggcacgtgtattgccgcaaagcatttttcttcccgttgtaaggttttggcagcagaacctgcaggtgcggatgatgcgaagcggtccttggaaagtggtgtccttattccacagacaaaccctaaaactattgccgatggacttttaacaagtt

SEQ ID NO: 4600 - DNA, 435 bp, Cyanidium caldarium
  Clone ID: LIB190-041-Q1-E1-G9
ggtcgacggacgcgtccgaccacgcatccgcccacgcgtccgcccacgcgtccgatgttgagctggctacaaaaaaaccacttgctagttgcaatattacaagtgtcaagaatgtttactctttatcgagtcacagtgcgtcttttcccctaatctttctttttcggtgtcgacgacgtcgaactacctaaaacgcaaagcagcaaagtcccaaagtttcgactctttttgtttctcccactagccatattgaaccaaagtgttttgcaccacttgccacgacaacgattggttcactctcgtgtgttttatcttgacaaaactcgaagactatttatttcttgttatgttttagaggtttttctagagtgtgtttttggagttgttgtacttccagtcttggtggttggtgaatggttctagtgacaaagagaa

SEQ ID NO: 4601 - DNA, 462 bp, Cyanidium caldarium
  Clone ID: LIB190-041-Q1-E1-H1
cggtcaagaatttacgggtcgacgcacgcgtccgagtgactattgtagtttttgtccagcggatgccttgggaggaaaatgtcctttgggaaggaaggactgttatataaggagaagagctgaaattctttgcaataatcgggaatcttttcgtagtagattatcaagtgtgtcatgtccttgcactatcgatgactatcagtgcgatattggttatgaaagaaaacctggttccacggaatgtcatccttcctatggtaccaacgatttttctagtcactgtggacatttggaaagcaaaggctacgtacttattccaggtgatacatgcgatgctacaaagggtctcaatctactgcctagtcgttcaagttgcattgcatattggatccgacgtattgtatacatcctattttggatattaagtattccaatgtttatgttttctatgatgttgttaac

SEQ ID NO: 4602 - DNA, 445 bp, Cyanidium caldarium
  Clone ID: LIB190-042-Q1-E1-A10
tcccgggtcgacccacacgtccgcttggagacgtgagatatcttgttggcagcaattgcaatccattttcgatatgctcaattctactgtctttgactcctccgagtcgtcattgttccatggaggaaattggagagtagaagcttttgtattttctttgttttatgcgttttatcgtcctgaatgtgcgatatctgaagtgtatttacaagagttgatgaggaaatatctttgttctgaagtcatgatcgttcgtgctatcgttcaaagaattgtccatctcatgatccaattgtccaaacatagagaagaggagaaatggagaagcattgttcgtcatttgttttctgacgagtcatttgtagagtcgctattgaaaacgatgtgtcaggattcatccttttatgaccccaatgagcaacaacaatcatctgcgagtactttc

SEQ ID NO: 4603 - DNA, 334 bp, Cyanidium caldarium
  Clone ID: LIB190-042-Q1-E1-A11
cgggtcgacccaagcgtccgaccacgcatccgcttgtacgggcaatgtcgtctacttattaagattcagaatacgcaaatattcagctcaatatctatcccacatgagatatgataatcggtggtgattacaggcaagttgccattaatatatccccaatgcagcctttacaacccatttcttagaatactatgcaaaatattgtccatcgaatactgattcgaagtgtactgtacagagatgagtgtgccactttggatggttttggaaggataccatcttatatatatactcatatatgtatacatacatgtagattaggaaggtagtgatc

SEQ ID NO: 4604 - DNA, 334 bp, Cyanidium caldarium
  Clone ID: LIB190-042-Q1-E1-A12
tcccgggtcgacccaaacgtccaattataacagatgaaaatagcgcagcatatttcaaccaactaaattgcagttttagattgcaaccagccacgactaattatgtgctaatttataaagacaacgttcacattaaaaaaaaaaaaaaaaaaaaaacaaaaaaaaaaaaaaaaaaaaaaaaaaaaaaaaaaaaataaaaaaaaagaaaaaaaggggagtagagcaagaggttagtaaggtacagaaaatgagcatggtacgtcaaaatcgtttagaaaaaatggcatacacacaattaagttggacgtctttttacacagtcgtgaatgggaaa

SEQ ID NO: 4605 - DNA, 446 bp, Cyanidium caldarium
  Clone ID: LIB190-042-Q1-E1-A2
ggtctagaattcacgggtcgacgcacgcgtccgaccacgcgtccgtcattttgtttcccatagcaacgaacctgtatttcgtgtatttcacaagtgcatcatgtgctgctttttagaacaaagaatagttgtctttcgggatggcctttgtatactgaaaaattccaacagctggttgttgttggatgctttgcgtgatatcacaaaacatgaaaaggacaaagaaaacccgttcttctatttctttgcggtttgtgaggcgttgatgaatttatggcgacaacggatgaacggcacgttggctggttcatcaccaccgagaaatgtatttgctttgacttggcaacgagaacagtctctttcccatgcacaacagttgcgactcgagttgaacgagttttgtcgaggaatatcttttcctttcatgaaaagatggaaaatgcgat

SEQ ID NO: 4606 - DNA, 465 bp, Cyanidium caldarium
  Clone ID: LIB190-042-Q1-E1-A4
gtacggtccagaattcacgggtcgacgcacgcgtccgaggtgaagcaaggagaggcagagataaccctcgaagaaggactccctcacgagactgtgacatcttcacaagagacaaaagatgaaggcccggaaacaaagccaaaccgctttgcaattactggccacacagaggaggaaatggatacagagctaagcaagcttgatgacgagaacaaccggctgcacaagaaaagattacttacttccacggtctttggtaaccctaaacattttatatgggtccttgcatcgtttgcgagcatgggaggaattctgtatggtattgaccagtctttgataagtggtgctggtatttatatgccagttgacctacacattgaccagaatagagaagacatggttactggatttatgccactcggtggagtatttggtgctttaatggtatggccaatcaacgaactg

SEQ ID NO: 4607 - DNA, 436 bp, Cyanidium caldarium
  Clone ID: LIB190-042-Q1-E1-B1
aattcacgggtcgacgcacgcgtccgaccacgagtccgctcttccttatattctttgtgcttggacaatggttgcaaagactgctctgagttgcctctttctctctttccttatcgctgccgcagttgcagccgacgtagtttcagaggagagatggggatatgctcagcaaacccaacaacagcaacagtgccaacaagtatgtaaacagtatgcatactatcagagtccagtctgcacttccgtaaccacacagagcccatactggacccaatgctcgaagactgtgcaaacctttgtcccaagccagtgcagtacttatacccaatctcctacatggacctattgcagcacctacaccaccactagcgtaccatcccaatgcagcaaggccgtgactacctatactcaaacctgctgtgcttatgcccaacaa

SEQ ID NO: 4608 - DNA, 441 bp, Cyanidium caldarium
  Clone ID: LIB190-042-Q1-E1-B10
attcccgggtcgacccacacgtccgttcactttggtcttacttgacttgcgactgaaggaaatggaaagtacgaagaaagctgccacggttagatatggttctcccaaaggcaacggttcggtgggacgaagtcatgttcacaagtcaaagagaaaccacttgaaaaacaaacttgttagcttgttttttgaacaaagtcaaatatgcaaagcagattattggaacttgttactgttgttccttttagctttcaccacaagattctggcgtttgttttaccctgctgctgttgtatttgatgagtttcactttgggaagtttgtcacttggtacttcaaacatcagtattatttcgacatacaccctcctttaggaaagttaatactatatcttggtggtttgttaggtggatataatcctggttttttgtatgatgctat

SEQ ID NO: 4609 - DNA, 455 bp, Cyanidium caldarium
  Clone ID: LIB190-042-Q1-E1-B2
ccggtcaagaattcacgggtcgacgcacgcgtccgagtgaaacgtgagggtagttcatcatggttgagacaaaacttcaagatggtgttagtgcttctctttggactgttcgtctcttcctctacacagttattttagcattctctgccactatcattggcttggatggacgtaaagcagacaacatatggaacgacagcttattctatgatgggaagtacattaacttttgtgcttattctgcctcttctgttgtagaaggaggggaccatggagcgtgtaaatatgtcatggcgttggcgtctataagtttgattctagtctttttcttgtggctttttacatttgtagatgcgttgtatcctattcttaccaagttttggtttattgaattgggtatcaacgtgtttcaaacaatgtggtggttggttggagcaattgttgtatctgcaaaa

SEQ ID NO: 4610 - DNA, 431 bp, Cyanidium caldarium
  Clone ID: LIB190-042-Q1-E1-B3
attcacgggtcgacgcacgcgtccgaccacgcgtccgcccacgcgtccgcccacgcgtccgcccacgcgtccggaagtaaatagacgtttgaaaggcgtccagtatgaaaggagaaacgagtgtagcactgtctagtcgtccaactcagcgaaacagcaataactgtgaaaatgcagtaaactagcagtaggacggaaagaccccataattcttgactagataggtttagggaggagagagaatcatgaagtagaggaggtggggtaagagatgaaagaccactgcatgaggataaggaatctaactgagtaaggaaaataagcttaagctagtttggctggggaagtaaagcctaagaaagagtaaattaggcaagcaaaggcatgagagaagtataatagcagaagcatgcttgaagaaaaagaaagag

SEQ ID NO: 4611 - DNA, 451 bp, Cyanidium caldarium
  unsure at all n locations
  Clone ID: LIB190-042-Q1-E1-B4
ggtcccagaattcacgggtcgacgcacgcgtccgaccacgcgtccgccttggtaccagtatggcgtcggctattcacttcaaaatgaagtcggaaaaagacttttcgacgctttcttttgacggcgactttctcaaagtttcagacctcaagctgttagtggtagaaaagcgcaagctaaattatggggatgggtttgatttggttatcacagatgcgcagaccaatgaggaatatgcggatgagtccacgttgattccgaagaacacttctgtagtgataaagagggtaccagggcaaaagccggggggtattctttcgcaacaaacgttggcgcgcagaaacgaaaggtaatcggagaacgatttggcgaagatcancaacaacaacaactcgacgagtgtggaaagctcgtctggagactaaaccaagcatggtggaaataatatcag

SEQ ID NO: 4612 - DNA, 450 bp, Cyanidium caldarium
  unsure at all n locations
  Clone ID: LIB190-042-Q1-E1-B7
ccgggtcgacccacacgtccgcccacgcgtccggttgatgaaacaacttttccacgatgatatgtttcgagttggcctggtaaaagacgttgcaggagttcaagtttgtggtgctctaaaaaatgtgattgctttgggtgcaggcttttgtgatgctttagaaatgggaaacaataccaaatcggctctgatgagaattggactgattgaaatgcaacggtttacaaagaaatattattctaatgtgaagttggaaacgtttatggaaagttgtggagttgccgatttgattactacttgttatggtggaaggaacaggaaatgcgcagaagcctttgtaagaaccaagaagtcttgggaagagcttgaagaagaattactcgggggacaaaagctgcaagggacgactactgccanagacgtttatttgactttaaagaaagacaacgt

SEQ ID NO: 4613 - DNA, 267 bp, Cyanidium caldarium
  Clone ID: LIB190-042-Q1-E1-B8
acccacacgtccaaccacgcgtccggttgatgatgcgttttttcctggatgatatgtttccagttggcctgttaaaggacgttgcatgagttcacgtttgtggtgctctagcatatgtggttgcgttgggtgtcagcttttgtgatgcgttacacgttggaaactgtactaagtcggttctgatgagaattgtgctgattgagatgctccggtttacagctaattattactctaatgtgtcattggaaacgtttatgccaggttgtt

SEQ ID NO: 4614 - DNA, 158 bp, Cyanidium caldarium
  Clone ID: LIB190-042-Q1-E1-C1
aatcacgggtcgacgcacgcgtccgaaaaaaaaaaaaaaaaaaaaaaaaaaaaaaaaaaaaaaaaaaaaaaaaagggaggacgcacaaaaagataaaaaggttaaatacacgtggaggcgacctcaaaggtcttctagaatgtcacctaaattcactt

SEQ ID NO: 4615 - DNA, 402 bp, Cyanidium caldarium
  Clone ID: LIB190-042-Q1-E1-C11
tcccgggtcgacccacacgtccaatggttggaactgttggtgctggtagaattggttaccgagtgctgcagagactaaagccatttaagtgtaaagaattgctatattcgggttatcaagctctttctcccgaaatggaaagcggagttggagcgaaacgcgtaacttttgaggagttgattgaacgctgcgatgtgatcactagcaattgtcctcatcatgacaaaacaaggaatctcttcaacaaacaagtatttgataaagtgaagcctggtgtttacattgtcaatactgcaagaggcgctagtgtagatcgagatgcgttggtagaagctgtgaaaagtggcaaagtaagaggatatgcgggagatgtttggtatcctcagccagcgcctaaagatt

SEQ ID NO: 4616 - DNA, 365 bp, Cyanidium caldarium
  Clone ID: LIB190-042-Q1-E1-C12
ccgggtcgacccaaacgtccgaccacgcgtccgcccacgcgtccggtaaactagaatacgaagtacaacgagggaatgaacggaagttatggcaaaaacagctaccatcagcatcggtagcacgtgcgcaccaagctgtagagcagaataactgggtgtaaaggtcagtagtagagatgtgtgaaaggtaaaagataggcgagatcgatgatccgcatcaagtgcagagatcgctacacatcagcaagaaagaatataaaggaagagacactagatgaggagatagtgcatacgacgtgaagcggaataggaaatcgtgtagtctatgcaataaactgtggaatgtgtcagagtaagaggagtca

SEQ ID NO: 4617 - DNA, 395 bp, Cyanidium caldarium
  Clone ID: LIB190-042-Q1-E1-C7
ccgggtcgacccacacgtccaatatatcgttgctgaggatgaagcaagttgggaaaagttgtggagaggaaaacgcgaggtcattggatatactttggaagcagctttacagaaaacttgtattgtggaaaaccagttgagggaatggaaaaagaaactcgatagtctagcagacaattattcgttgggtacgagagcctatgatgcgagaatgtggtcattggacctcatcgcaactattatgagtgtctgttttgcagtttttggaatgttttcacaattctttggttaatatgtccaattgcccatttacaatatgggaaatgcgagtcagtattacttttatggcgtgatgggaggtatttccgtcggcctgtcgatcagcgtctatttct

SEQ ID NO: 4618 - DNA, 296 bp, Cyanidium caldarium
  Clone ID: LIB190-042-Q1-E1-C8
tcccgggtcgacccacacgtccaaaagatcggagcagacagtaaatgaagttaggaaacatatgaaatgacgcagattcaaggcccgtgtattcaatttagtagcagcatttacagaatacttgtattgggagtcattcgatcagggaattgaaagcgcaacacggaaacccagcacacttgtctgcaatcggtaagaggggtgaatgacgctagttaatcgccattagacctcaacccttacatcaccagtatcgggttgcacggttgtcgaatgatcttactgttcagtgacaa

SEQ ID NO: 4619 - DNA, 388 bp, Cyanidium caldarium
  Clone ID: LIB190-042-Q1-E1-D1
attcacgggtcgacgcacgcgtccgaccacgcgtccgcccacgcgtccggtttgccaataaagacgacaacggaggtgcaatgcccatttattggttggagatccaagcgtcgtattctgccaacgtacaaaggataagcgtccatagcaactatatatggcacttgcagctacaatgtatgcaatgtagtgaaaaaaccgggtggattgcagtcgatcctttgcaggaaacgacaagagtgaaaagtgggatttgtcacgtattgtttcactgtcgactatgtaaaagacaaggtacggtgacattgttggatgaacctcaccaatatgacaagaatgaagagtttcaaaagtttgcgagttttgattgtcgaggactcgagccaat

SEQ ID NO: 4620 - DNA, 409 bp, Cyanidium caldarium
  Clone ID: LIB190-042-Q1-E1-D10
ttcccgggtcgacccacacgtccgaccacgcgtccgcccacgcgtccgttgggcacgagttgacgattgaacgaagccatgcctcccaaggcacctccctacaagataaaaggagttatcgaatactttgtttcaccgaatgaacagaagctattttcagacttgacggatataaaacttctgacgacgaaagctagaagaaaggtggcggataatctcccttccatgctccccggtattctactgttttgtggttgttactttggtggctattatgtgcatgagcagaggatcaagagtgctcggtggtaggcgtcggttggtgtgtttgtgttgttgtgtgtatgaaacaatgacatgaaaaccatgctttattctaaaaaacacgtggatgccacatgttagattg

SEQ ID NO: 4621 - DNA, 369 bp, Cyanidium caldarium
  Clone ID: LIB190-042-Q1-E1-D12
ccgggtcgacccacaacgtccgaccacgcgtccggaaagacgcagatattgaacctcattcctgtagaagacagatccgactacctgtgtgccatggcaagttaagggagtagatcacgaaaccacgctgaaggcaatcctagtgagagaatgagtcatgtgaatgacatcacgaccgctagtgatcaagcacagtgtcacagctcatacctagggcacactgtctcaacgactgaaccaggagacgtcgaacatccagcaggtcagctctctcgctacgatcgaaacgcaactccacttctaagcaatctgattctcctccaacagcgttaccgctcatccgttcaagcgatatcctagaagtacgtc

SEQ ID NO: 4622 - DNA, 406 bp, Cyanidium caldarium
  Clone ID: LIB190-042-Q1-E1-D2
cggtccagaattcaccgggtcgacgcacgcgtccgaacgcaaatacgggaaagcagtaggagaacaaagagaaacgacaacactgagtatcaggacaaatagagggagtagatgaagacagcaagatcagcgaactatgagtaggaaaagagtacagtgcatcgaaacatgacactagctgcagaagagagtgtaaagcgcgtaccttttgcagaatgtcccagccagtgcaatacgaagcacgacgaaagatgaaagaagtagccatgtcagacccgaagccacttgatcctatgctgtccacgcgatataatgctgaaccagtatctgtggcaacagatttggaagagatggcataatgagtgaaatgccaatcatgactagtgataactcgtactcctcgaaa

SEQ ID NO: 4623 - DNA, 416 bp, Cyanidium caldarium
  Clone ID: LIB190-042-Q1-E1-D4
gtccagaattcacgggtcgacgcacgcgtccgaccacgcgtccgcccacgcgtccgattttctgcctgcgggtgtgtgtgtctgtgtgtgtgtgtggttgtggttattgggatgtcagactctgcaacacctaccaaacctttgattggtaagaaagctgttgtaactggaggaaacaagggtattggagaagctatatctcttgctctagcagaaaaaggagcggatatagcaattattgctcgagatacggattcagctcaaaacgtgatcaagaaagtgcgttcagagagacgtttctgtaaggtttaccccgcggatctcaatgactctgcttgtgtgaggaaagcagcaaaggagatactggaggatatggggagagtagatattctagtcaataatgcgggtatgtctca

SEQ ID NO: 4624 - DNA, 441 bp, Cyanidium caldarium
  Clone ID: LIB190-042-Q1-E1-D7
ccgggtcgacccaaacgtccgactcaacgacgtaatgagactcactcattttctctttgttttgtcttttgtagctgttttcctcgtagctcatgcagttcccgttggagaagatgcattcagtttcagtcagacttttggaaatgcttctgcttcaggcaacgcctctgttattccagctacaaccaagatccccaagttagaagtaactagtagtgcctcatcaaaggacaatggaaaagcagctcaagtagactttgcagattactcaaagggatatccttcgcctagctatttttacgctccttcttacacatcctatgtggaatttcctcaatatccatcctatccatcatggccttcttttaatgagcagcctgcctttggtggcttcgatcccaatgcagagtttggagagtctgaaattttcgtgtgatggga

SEQ ID NO: 4625 - DNA, 435 bp, Cyanidium caldarium
  Clone ID: LIB190-042-Q1-E1-D9
gggtcgacccaaacgtccgactgcctgtatcttaacaggatggattggcgaatcagaaaatagtttgcgaaaaaatgttcgtgtctcactccgtacctgcaagaaacttaccggctttggcacgtaacttttccaatgtctgtctctcgaggagtggtctgagagggggatgtttacgaaatgtgaaagttttcaaccacaaacgacctgcaaggttgttatctacgaaaatgagaggaggcgaccatgaaaggagagaacttagtcgtcctatgcgtacgcttgattccgctttcgatgaacttttagcttttgcgcaagatccctggtccatgtttcgctctccatggagtctgtcgcccagaagtatggcagtagacacgtggatgcctcgtgttgacttggtggataaggaagatggcttttatgcatacg

SEQ ID NO: 4626 - DNA, 125 bp, Cyanidium caldarium
  Clone ID: LIB190-042-Q1-E1-E1
tttttttttttttttttttttaaatggaagcaacccaactttattattcaaagtcattacaccgcggaaagctccatcgataagcatctataagtccgttcgaggagcattttttcgcatccagt

SEQ ID NO: 4627 - DNA, 372 bp, Cyanidium caldarium
  Clone ID: LIB190-042-Q1-E1-E10
tccgggtcgacccacacgtccgaatttacggaggtttggattaaacacatcattggctgtggctcgaagccaagttagagacaattagagggaagcagttttgttatgagtcttcttttttgctacactacaagaacatgggtgaaaacagaagtgtaacgtccgaaaggtcaaacgaaaagcagataaatgcgttgaatgaaacacgaaaacagcatatggccagaagagcttttgggaaggcatttcgaatttacaacatagcaatcgagttgggcccgaacaatgccttattgtacagtaaccgctccgctgcctacttcaacttgagaaattttgaagcggccttggaagatgctctaaaaggcgttc

SEQ ID NO: 4628 - DNA, 457 bp, Cyanidium caldarium
  Clone ID: LIB190-042-Q1-E1-E3
ggtccagaatttacgggtcgacgcacgcgtccgacacggattaaatcgacattattattctctggcagtggcttatcgtaagaacgagctggaggaacaaatgttgctcaatttgcataagaaacactggagcagaggcttaaaagtgacagactttgaagagcgagctgagaaaaatgaaaaggcagttcagtccatgttggagttggcaaagagttatagcaaaatgttggaagaagaacgtcaaatgacaaaggaacaggctgcaattgcaaatgttggcaaagtagacgcaaagaaacggttggagcaggatgtgacggagttgatgagtaagaatattgatcagtgtttaagttccatgttagattctgttgttttccaacaagcttgaccttcaacagttgtagtgtcctttaaatagcggtttggtagtgtgtcctaatgtaaagaatgt

SEQ ID NO: 4629 - DNA, 430 bp, Cyanidium caldarium
  unsure at all n locations
  Clone ID: LIB190-042-Q1-E1-E7
ggtctagaattcccgggtcgacccacacgtccaatcgtacgtttcatccggccaagcgactagcatcgacgagtactagtagaagagtaggtgcaaggaaaaccaggaagagtaccgggaccaatgtggtgacgacaacatcgagtccatcggaaaaggaagaaaaaagacaacaactggcaatgatggatgaaccacgaaaattgcgcagtcgagatgccatcaagcggccatcgagaatgacgacgacgacgatgacgagtactactaccgcaagcaatagttgagaatctccatcatacatacacatagagagagagagagagatacgttcatcacatgtgtgtgtatgttggcatttgtgctcgaatagatatagcctcgataganaagtaaatgaaatgagcagcaacacaacttanaataacac

SEQ ID NO: 4630 - DNA, 419 bp, Cyanidium caldarium
  Clone ID: LIB190-042-Q1-E1-E9
cccgggtcgacccacacgtccgcaaatgcggagtgactaactattttgattgctgcttacaggaagctttggaatggcgactcccaactcagaagatgacagcgtttggaaagaaatattccactcattcaccagcagatggtcgcaaaggctaaaacgtcttccagagcttccttcgtatattagaagtggtgctgcgtgggagtcggtgacaagaaagttccatgactggaaagaggcagttgtggcaaatccttatcctgctgcagcttatgtggtgacttttggtgttctgtatgggaggcttctatggacaataagagtgtcaagaatagaagaggctaggatcagacgtacttttcaggaattgaaggatcgacaagctcgagaaaaagcaatacaacagcttcgtgaacaaa

SEQ ID NO: 4631 - DNA, 373 bp, Cyanidium caldarium
  Clone ID: LIB190-042-Q1-E1-F1
cggtctagaattcacgggtcgacgcacgcgtccgagtgaatcttcagctttccatgtttcaagttttgcaaggtacaatagtattttggatattttccttgattggtttctttgtttgttactttttggttgttcaagtccaaaaaactatttattgagagaaaggccggtcgacgatggcgaaggaatggatgtatgtttggtgaagaagagagagagaggctttgtgcagatatttagatggagtctgttacaagaaagaatattctggaactagaagaaagatttggagatagttcttcttctagtgacgaagaaacaaatactattggaaacgttcccattgagtggtataaagacttgtcacacgttg

SEQ ID NO: 4632 - DNA, 383 bp, Cyanidium caldarium
  Clone ID: LIB190-042-Q1-E1-F10
ttcccgggtcgacccaaacgtccgaccatgcgtccgcgagagaagaatccatgactacactaattaagtagaagatacgaatgcgttccacaacaggatgaataaaatatgtctcgaagaagccaaagacatggccagctatgttcatgtcttgttgtctcagatgcagagccattttcgaactatggaagacactctactaggcagaattgcagatatgggtagtcatatagtcgaactggagaagtccatcgttgagatgattgaacagtctggagtgaaggatggcgcagtaataaagtctggtgtagttactacgagaagtcgtggggagtaattgcgtaagttgtagtacgttgactttctaccagcatcgctcgtac

SEQ ID NO: 4633 - DNA, 443 bp, Cyanidium caldarium
  Clone ID: LIB190-042-Q1-E1-F11
attcccgggtcgacccacacgtccgaccacgcgtccggggaattttgtccgagagttgtagtctccgtcatgtcttcctgtcctccagcagcttcgttctttggttatattggtgctgcaagtgcccttgtattttcaaatttgggtgcagcttatggtacagcaaagagtggtgttggcgttgcttcgatgggtgttatgagaccggaacatgttatgcgatctataattcctgtagtaatggctggtgtgctaggtatctacggtctcatcgttgctgttagtttggttggacaaattgccgaaacgaactatccatattttcttggctttgcacaccttgcttctggactagcaaacggtctcagcggtctggcagctggaatttgtattggtatacttggcgacgcatgcgtccgagctacatctcatcagccaaaact

SEQ ID NO: 4634 - DNA, 326 bp, Cyanidium caldarium
  Clone ID: LIB190-042-Q1-E1-F12
cctaaaggatccacgcttacgtacgcatgcatgcaatgtcaggggcgcttctacagtgtgatctaagttcagttcacgggccatcgatttcaacgtcctcactgggaaaaccttggtgttacccaagggaattgccttgcaatagatccgccttgcaccagctggcgttataccaaataagtccgcatcgatcacccttcccaaccgttgctcggcctaatgggcaaatgggacgcacctattaccggcccaaaaagcgccgcggttgtaatggttaagcgcatcgtcactgtcacagttgctaacgcccgacggcccgcaccttt

SEQ ID NO: 4635 - DNA, 420 bp, Cyanidium caldarium
  Clone ID: LIB190-042-Q1-E1-F2
ggtctagaattcacgggtcgacgcacgcgtccgaccacgcgtccggtcgatgttgggcggtgctcgagttgtgttttcaggaaaggctggaactttgctcgttccacgggaatatggttatgttattttcgttgttatattttacactttcatactgttttggaaagaagtcaaggttgggcaggcacgaaaacgtttcaacgtaaagtatccgaccatgtatgagaacaaggaggacagtcactttaactgctaccaacgtgctcatcagaacactctggagaagacaccaacctttcttgttcttatattgttaggaggaatatatgctcccattttctgttcgatatgtggactgatttggtgctttggtcgcattcagtatgctttgggttattactcaggtgacccaaaaaagag

SEQ ID NO: 4636 - DNA, 411 bp, Cyanidium caldarium
  Clone ID: LIB190-042-Q1-E1-F3
attaacgggtcgacgcacgcgtccgacgacaattgtgcaatgttgaaacaaccggtgacgcaggttcgactcaccaacgtgattgttgttcgtttacagaataacggaatacggttcgaaatagcctgttatagaaataaagtgctttcttggagaaatgggacggaaaaggatctggatgaagtgcttcaagtagaaaacgtgttttccaacgtatcgaaaggcatcgtagccaacataaaggatttaatggagtgtttccaaacgacggatattcgaaagatatgcgtcgagatactcaacaagggagagttgcaaatttccgacaaggagcgcaacaccgtgtatgaaagtttggtgcacgaaattgcgacaatagtagccaacaagtgtattgacctggaaacaaac

SEQ ID NO: 4637 - DNA, 408 bp, Cyanidium caldarium
  Clone ID: LIB190-042-Q1-E1-F4
gtcaagaattcacgggtcgacgcacgcgtccgggttgtattcttggtagcagttgtacattcaacatcatcaaatgccaaagggaggaaagaaagattcttcaaagaaagaagccacaagtaaacctgcagcagcagatgctacaaagacgacagaaaagtctggtccggaagccaagttgaagggaactggtgcaaagaaacaataaaaagttgactatgcatgtgcagtcctgttatgttttgtgagttctgtttgatagtttccagctattcttttggtagtgaataaagagaaaattttttatatttaagaaaagttgcaaaattccgaaaaaagaacgcaacaccagtgtatgaaagtttggtgcacaaaattgcaaacaataataacaaaaaagggcggccg

SEQ ID NO: 4638 - DNA, 458 bp, Cyanidium caldarium
  Clone ID: LIB190-042-Q1-E1-F8
ggtctagagttcccgggtcgacccacacgtccaccatcacctcatccagatcgttggaacttgggtgaagtgtttattcttgcaacggcacttggctggtggctcactgcagcaactctcatttactttacaactttgtacaagacatctttctggacagatacttttcctctgtacgcagattggaagaatcccaagttgctcgctataaggcctccatacttcacttatggtcctcaaaatagttttatgctaaagtctctcatctatctgcaagtatctatgattggacaagctcttatcttctgtacccgtgcatactggatgttctttatggatcgtcctggtatcttattgatgggtgcattttgtactgcacagactcttgctactttcttatccgtttatgccaactggggctttacaaatattgaaggagttggctggggctgggctgc

SEQ ID NO: 4639 - DNA, 361 bp, Cyanidium caldarium
  Clone ID: LIB190-042-Q1-E1-G12
cgggtcgacccaagcgtccgaccacgcgtccgcccacgcgtccgaaaaaatcatcgcatgagaaagaagactgtagctgctcatatgaaagcagaacataaaaaggatcgcaagttggcaacaagacgacaagagagcaaatcagagctgtcgtccaagtgcccatcggagtccagtgaggaagaacaagtgtcatcgatggaagaagaagacgtaggattgatgtcgactgtcattgataagacttagtatttgtcgtcgcaagttacagtggatcctgatgcggatattacgggcttctttgacctactggatgaagaaacttctgggtgtagaataataagagtcaactttcatttgt

SEQ ID NO: 4640 - DNA, 445 bp, Cyanidium caldarium
  Clone ID: LIB190-042-Q1-E1-G3
ggtcgacgcacgcgtccgggaagcacctgacggaaaggaatgcttgaagatatatattgttacaacggagctcgccgcgtcattgtggagaggcgaagttgatggtcagctagttcttgtaaaaggtccttatttagtcaggtccattgagctcaaaaacggggacctagtcattcgcggtgacgtggatagggacagcgatattacaatatataccaaagtacttttcaatcgggctcgattcaatgatgaaattttaaggctttcaagaactggttgtgaaggtcttatggcacgcgtgcaaggacctccaaaagtctcactgccccaactgaacaagtggaggttcaaaatgggttcacctgaaagattcccagactttgatgacactcgctgggtgattgcagacaagtatactaccaacagtattacgcctccaatcacg

SEQ ID NO: 4641 - DNA, 141 bp, Cyanidium caldarium
  Clone ID: LIB190-042-Q1-E1-G7
acggacgcgtgggaaaaaaaacaaaaaaaagaaaaaaacaaaaaaaacaaaagaagtggaggtagcacaaaaggatgcaagcttacgtggtcgtgcatgcaattgtccgtgcgtcttctacaatgtcacccaaattccatt

SEQ ID NO: 4642 - DNA, 433 bp, Cyanidium caldarium
  Clone ID: LIB190-042-Q1-E1-G8
gggccgacccacacgtccacccacgcgtccgcgttttcgtgtactcggaaagaaagcattcgttcaccagaggtacatcttcttttgttgatccctaggcttacttcattttctgaagtgttacgccgaaagtcagcactgcaacaaccactttcatattttccgaaggaagagttttttgaggcatcaatcaatgttagatatccatcttcgtcgcaggtagccattatttgacctccgcctgctattcttgaaaattcaaccgcaaacagaggtactggatagtattcatcgttcacaaactcacacgagtgacgcctagaagtccacaaggtttttaaaagttcatgtgttttctttctatataagtcatcgtattcttgtcttgagagtctctctagctctcgtgcaaacaaagtgctcagagtacaat

SEQ ID NO: 4643 - DNA, 440 bp, Cyanidium caldarium
  Clone ID: LIB190-042-Q1-E1-H1
cggtccagaattcacgggtcgacgcacgcgtccggaatatagtcatttcttatggaaagagaagaacaacagcaattcatcgacgagtcaggataaacgacagtatcatttatccaattttatagcaatgacgggacatgtgattgctcgagcggaaaaatggaaatcaaagccttggacagcacgtgctacttgtagtattggattgcaaggtcaaaaaggaaaacttcgtagaaaatggtttgattttagtggattctcttttcaagtctcacaaactgtgggtgcactttccacctttctatttgaaagggaagaacaaagaacggctttgaatggcggtttggttcaacatttatatggcaactgtagaataggattggaaaggagatggacttgtgtttgttggcaaccaatggaaaccaaactatctttgcaat

SEQ ID NO: 4644 - DNA, 449 bp, Cyanidium caldarium
  Clone ID: LIB190-042-Q1-E1-H10
cgggtcgacccaagcgtccgagtagttccaattctgataaagaaggtctccatattggcccaaactgtcaacttgtagtttgctctgttgataacttgaaagactttttgggtcagcaagtttatgaacaactccagaaagtatcctctgatactgaaagcgttttgaacaagttggatcctctcgcgaagttgttaggacaattattgacgagcgatgttcctatagaacccgattcgtcccatattttttccaaaacagcagatagggacgagatggaagtggaagatgtgagtagagaaagagtacgaggtgttataccttttgattggaaaacgtttcttcaccagcgtgctttattgccggaagaagtttcaactcgttatgctccgagtttttcacgtatatttggagataacccaagagtaattctgaggagctcactaaag

SEQ ID NO: 4645 - DNA, 111 bp, Cyanidium caldarium
  Clone ID: LIB190-042-Q1-E1-H12
gtccgagaaaggaatggttttattagatagtggagtcagtcgtttagactagtgtgctgtatatattgtttgacgtcttgaaaggttcgtcccggtgctgtgtgggacttt

SEQ ID NO: 4646 - DNA, 461 bp, Cyanidium caldarium
  Clone ID: LIB190-042-Q1-E1-H2
attaacgggtcgacgcacgcgtccagtagcgaaacaagagaagggaagtaaaaggtaagaaagaggaaaggtttacgagagaaggaagtagaaagaagagagtgtaaggcggcgtcataatagaaatccgaaaggagtagaagaaaagagagagaagaaagaaaagaagagaaaagccgtactgaagaccgacacaggtactcgaggagaaaggagacccaaattaaggtgagagaatggacgataaggaactaggcaaaaggatatggtatctgcggtagaacatatgaaagaagcagcaccgactgtttagcaaaaacacagcactctgcagaaaagagaaaatgtaaagtatagagtgtgcggcctgccaaatagtggagtagcgaaacaagagaagggaagtaaaaggtaagaaagaggaaaggtttacgagagaaggaagtagaaagaagagagtg

SEQ ID NO: 4647 - DNA, 466 bp, Cyanidium caldarium
  Clone ID: LIB190-042-Q1-E1-H3
ggtccagaattcacgggtcgacgcacgcgtccggaatcagggtaagaggtagaggagcaagaagagaagagagaatgctgggtggagtagcgaaacaagagaagggaagtaaaaggtaagaaagaggaaaggtttacgagagaaggaagtagaaagaagagagtgtaaggcggcgtcataatagaaatccgaaaggagtagaagaaaagagagagaagaaagaaaagaagagaaaagccgtactgaagaccgacacaggtactcgaggagaaaggagacccaaattaaggtgagagaatggacgataaggaactaggcaaaaggatatggtatctgcggtagaacatatgaaagaagcagcaccgactgtttagcaaaaacacagcactctgcagaaaagagaaaatgtaaagtatagagtgtgcggcctgccaaatagtagagaagaaatcgatgaaagtgaaag

SEQ ID NO: 4648 - DNA, 392 bp, Cyanidium caldarium
  unsure at all n locations
  Clone ID: LIB190-042-Q1-E1-H4
ttcacgggtcgacgcacgcgtccgagagaaggaagtagaaagaagagagtgtaaggcggcgtcataatagaaatccgaaaggagtagaagaaaagagagagaagaaagaaaagaagagaaaagccgtactgaagaccgacacaggtactcgaagagaaaggaganccaaattaaggtgagagaatggacgataaggaactaggcaaaaggatatggtatctgcggtagaacatatgaaagaagcagcaccgactgtttagcanaaacacagcactctgcagaaaagagaaaatgtaaagtatagagtgtgcggcctgccaaatagtagagaagaaatcgatgaaagtgaaagcgagtaaaagatgaggtatagagaatggcggtcctaacag

SEQ ID NO: 4649 - DNA, 265 bp, Cyanidium caldarium
  Clone ID: LIB190-042-Q1-E1-H5
caggtaaaggtctagaagtcccgggtcgacccacacgtccgaccacgcgtccggaaagaggaccgaatcagggtaagaggtagaggagcaagaagagaagagagaatgctgggtggagtagcgaaacaagagaagggaagtaaaaggtaagaaagaggaaaggtttacgagagaaggaagtacaaagaagagagtgtaaggcggcgtcataatagaaatccgaaaggagtataagaaaagagagagaagaataaaagaaaatcac

SEQ ID NO: 4650 - DNA, 264 bp, Cyanidium caldarium
  Clone ID: LIB190-042-Q1-E1-H6
tccacccacgcgtccggaaacaggaccgaatcagggtaagaggtagaggagcaagaagagaagagagaatgctgggtggactagcgaaacaccagaacggaactcaaaggtaagacagaggaaaggtttacgagagaaggaagtacaaagaacacagtgtaaggcggcgtcataatagaactccgaaaggagtagaacaaaccacagagaccaccacccgtcgacacaaacggcggccgctctagacgatccacgcctacgtac

SEQ ID NO: 4651 - DNA, 449 bp, Cyanidium caldarium
  Clone ID: LIB190-042-Q1-E1-H7
attcccgggtcgacccacacgtccatgttagtcttcagtggtgagcggatatgtctctgacagacatcctgtattgggtggacccagtagtttggagcaaacgctttgaccttccactatctgttacttgcttctttatatatttcatagtatttcatatagcttgtgccttctttggtattgctgactattggaagcttctgcgcaagtacaagctgcacgaaagtgacgagaagacctacctgcagttgctgccaagagttgtgttcaatcaactggcgttttacttgactagttgctacataggagagaaaatgggttggatattcagaaccccttctaaagacaatgctttccaactctggaagttgcctatctatcttactttgtactctttctatcatgaaattatagtttactctgctcatccttggctgttgcaatccaag

SEQ ID NO: 4652 - DNA, 363 bp, Cyanidium caldarium
  Clone ID: LIB190-042-Q1-E1-H8
acccacgcgtccgaacaactattatcatcttgtgatgctcgccccctcctctttttttattagaacatcatggtacaaacgaaatgatcaaacacacaaggaataaaggcaacgtcgactttttggaatagggccatgttatcgaaatcgcaaaactaataggcataacgtgtggaggtgattttcaaaaggtggatagacgtattgtatcaattattgtaaaatcagggaagatcttcaacggagcaagttgtaaacgcgaaaaggtttcccaataaaaagtagatgaccctaatgtttcgctgtaaggaaactttgtttaacattaataaaagctcttaaagttattggtcttgtcaaaaa

SEQ ID NO: 4653 - DNA, 425 bp, Cyanidium caldarium
  unsure at all n locations
  Clone ID: LIB190-043-Q1-E1-A10
cgggtcgacccaagcgtccaggcagcttcagttttgactcagattcaaagagaagccatggagaaggcagggaaaacatggaatccggatgaggaaaaagcattccgtgattcacttatcgaaaagtatgaaagggaaggctctccttattatgcgtccgctagaatatgggatgatggcgtcattgctccgcaagatactcgaaaagtattgggtcttgccttgtccgtcgtaaccaatggacagaaagtatccaaagaacaagagcatccgttttcctatggtatattccggatgtaatggttatccagaatcatttctaagcatctctataaagatttattttattttcttgtgttaaaaaaagtcnttgcaaaagcaaaacgagcaagaagaataactactacgaaaacattacgctgggt

SEQ ID NO: 4654 - DNA, 444 bp, Cyanidium caldarium
  Clone ID: LIB190-043-Q1-E1-A12
ccgggtcgacccaagcgtccgagcacctgtattattatcgtttttgttgttgttgtaacagcctgtgtctctctaaagagtttcttgaaatgcagagagttggattggttggtgattcggtcaccaagcttcacttgttaaggcgcagtttctcgcaatatgcaagaccttggaataatcctgaaggaatatatgcctttgttcgacgtgaaaaagatttgggctccttacccggtagagaatggactattgatgagctaagattaaaatcctttgacgacttgcacaagctttggtgggtccttataaaggaaagaaacgctttgttaactgaaagagactggtgtcgtacagcgaaacgagaatggaacggtgaaaaagctttagaaaaggtatgaaggagagcaaacctttgtctgtcccgtatcgtcacagcaacaacac

SEQ ID NO: 4655 - DNA, 356 bp, Cyanidium caldarium
  Clone ID: LIB190-043-Q1-E1-A4
tccgggtcgacacacgcgtccaacaaacaagaaatggtatataatgatagatgatgatacttatgtctttttggataatctcgccctaactttgcaaatggatcatttccgtcttttggcggaagaagaacccttttacttgggcaatccgttcacagtgagtaattgtgacaaatatggagagttctttgatgatcaaggaaaaccaaatccctcctttgctcatggcggttctggaattgttctttcgaaagcggcactggaaaagatagtcgatcatattccgtggtgtatagaacgttgggacgtttgtaaagaaggggatgctgcaattggtccctgtttgctttcttttc

SEQ ID NO: 4656 - DNA, 382 bp, Cyanidium caldarium
  Clone ID: LIB190-043-Q1-E1-A8
cccacgcgaccacgcgaaacaagagaagggaagtaaaaggtaagaaagaggaaaggtttacgagagaaggaagtagaaagaagagagtgtaaggcggcgtcataatagaaatccgaaaggagtagaagaaaagagagagaagaaagaaaagaagagaaaagccgtactgaagaccgacacaggtactcgaggagaaaggagacccaaattaaggtgagagaatggacgataaggaactaggcagaaggatatggtatctgcggtagaacatatgaaagaagcagcaccgactgtttagcaaaaacacagcactctgcagaaaagagaaaatgtaaggtatagagtgtgcggcctggcaaatagtagagaagaaatcgatgaa

SEQ ID NO: 4657 - DNA, 436 bp, Cyanidium caldarium
  Clone ID: LIB190-043-Q1-E1-B10
cgggtcgacccaagcgtccagttagaccttgcctgtggtagtggggaaacttcccttcaagttgctcacctagtttccagccacttaaaggatgaagccaaagacgcaaagatagtttgcgttgatatttcggacgaaatgcttaaagttctcaaccaaagagcacaggaaatggggctagcaaatatggtggaaacccgctgtgaggacgccgagaaggtcgactttggtgcgcactattttgatatggttatgagtcagtttggagttatgtttttgccccatcttgtggaagacttggcgaggattcgcggtatgatgaaaccgggtagtttattttcttgtgttgtttggggagaggaaaaggactgtcatattttttacgcagctaggagcgttatcagtcctcctcctccacctccaggaactccagttt

SEQ ID NO: 4658 - DNA, 331 bp, Cyanidium caldarium
  Clone ID: LIB190-043-Q1-E1-B4
acgcgtccaccacgcgtccgcccacgcgtccgaaaggagagaaagaggaaagggatgaaatgcagagatctctagagaaaggcaagaaagaaaagaaaggaagacacagtaaatgaggcgagaaagcataggaagtgaaacggattaggaacccgtgtagtctatgcagtaaaagaaagaatgagtaagaaaaaagggagtcattccaccaggggagtaaaggcgcatgaaagaaacccagaccaattgacgggaatcggaaaaaggggtggatcactaaattaatccgatataaaccgagaaccttacctctccaagagggtgttgcacg

SEQ ID NO: 4659 - DNA, 302 bp, Cyanidium caldarium
  Clone ID: LIB190-043-Q1-E1-C12
cgggtcgacccaagcgtccgagccacgcgtccgaaaaggagggaatgaagggaagttatggcaaaaacacgtgccagcagcagcggtaaaacgtgtgtagcaagcgtagagcagaagaactgggtgtaaaggtcgagtagtagagtaagtgtaaaagggaaaggaaaggagagaaagaggaaagggatgaaatgcagagatctctagagaaaggcaagaaagaaaagaaaggaagacacagtaaatgaggcgagaaagcataggaagtgaaacggattaggaacccgtgtagtctatgcagt

SEQ ID NO: 4660 - DNA, 297 bp, Cyanidium caldarium
  Clone ID: LIB190-043-Q1-E1-C6
cgacccacgcgaccacggacgcgtgggcggacgcgtgggcggacgcgtgggaagacaacaatgtctcgtcccaagtgtttctttgatattgctatcggtggacaacctgcaggaaggattgtattcgagttgttctccgatgtcgttcctaaaaccgcggaaaatttccgtgccctgtgtaccggtgagaaagggtttgggtacaaagactccaagtttcataggatcattctccagttcatgtgccaaggtggagactttacacactgcgatggaaccggtggcaatagtatttac

SEQ ID NO: 4661 - DNA, 429 bp, Cyanidium caldarium
  Clone ID: LIB190-043-Q1-E1-D11
gggccgacccaagcgtccgaccacgcgtccgcccacgcgtccgcccacgcgtccgtacgaaaatgagccaaagcgactcgtttggtttgttgcttttcgcgccagcagctgtatccaaaaaagcaacagttatcaaagacttgaaacaacaagattgtgagatagtgtatgaggaacagattagattggacgtcgagcgtgcgaaaaagtttcttgagttgtattccaagcgcagtgaagaagaagcaaaccgaaaagaagacacgatagccacactaacggaagactcctgcttggcacttgttgtaaaaaagaaacaactttcgacgaccttgaaacaactatttgaacagaataatgtttctgcggataaggagggaggaggagaaaacacggaggagaatgttttctcgacaaaatatggttttc

SEQ ID NO: 4662 - DNA, 386 bp, Cyanidium caldarium
  Clone ID: LIB190-043-Q1-E1-D12
cccaagcgtccaggaaaaatgttaagttggttgggtcgttggtgggacagtcatgtagtagaaatggctttagacaatgttaaaaatgagcagatggaaagaatccgcaagacaattatttcaagggtaccagacgttcctaccgtggttgaaattggagcaggctcaggtctcaatttcctgcactacccttcttatgtgaaggatttgacagttattactttacaagaagaactcagcaaaagagctcgacaaaaggcacaacagagaggtctgaatgtgcatcatattcagggagatggccgagtacttcctttgaaagataactcggttgatgtggtcgtagcaacccttctattgtgcacagtaagcgatgtcgcggggtt

SEQ ID NO: 4663 - DNA, 155 bp, Cyanidium caldarium
  Clone ID: LIB190-043-Q1-E1-D8
acccacgcgaccacccacgcgtccgaaaaaaaaaaaaaaaaaaaaaaaaaaaaaaaaaaaaaaaaaaaaggcggaagcacctgagggtataaaacttacgtacacgtgcaagcaactttactggctcgtcgaaactgtcagccaacgttactttt

SEQ ID NO: 4664 - DNA, 73 bp, Cyanidium caldarium
  Clone ID: LIB190-043-Q1-E1-E10
aagaggttccaggcttacttccgcgtgcatgcaacttcatacctcttcgtatattgtcacctaagtgtcactt

SEQ ID NO: 4665 - DNA, 109 bp, Cyanidium caldarium
  Clone ID: LIB190-043-Q1-E1-E5
ttacaaagcctgtaaaatcctcgtagtccttacgatgagtctacgtggtacacagatagtagaacacttcattttttaaccaaaaagaaagaagaggagaagggagggg

SEQ ID NO: 4666 - DNA, 406 bp, Cyanidium caldarium
  Clone ID: LIB190-043-Q1-E1-E9
cgggtcgacccaagcgtccagggtgaatggcaaaaacaccaaaacagtattaaaagagaaacttaaggtgcaaacagatctgacggaaaatagtcagaaaaataagtcttcaagctcaagagcttcttgggaagagtctttgcggagtgcgaatagaagagacgaactggaatgttcgacttcgtagtttggaaacgcagctttatgcactttttgtatttgttttgttaatgtcccttgttgtcttgattggatttttctttgttcttcgagcagaatgaattcaaggccaccttttgaatgatcgtatcgatcatttagaagagctgctaaaaagtcaggatggaaaatgtcagagagatttgcctccagtagcagaatgtgctaaagaaccttcgtcactcat

SEQ ID NO: 4667 - DNA, 376 bp, Cyanidium caldarium
  unsure at all n locations
  Clone ID: LIB190-043-Q1-E1-F10
tcgcccacgcgtccggtagattcgaaagcaaatacgtccattggtgaccttgcatcgtacaagtgcattgtgttggaaaattgctgcaattctgttgactcgtttcacttgttcctatttcattgtttcctttacggcattatcttttgaagctagttttaaagtgtatcgctctttacacttgattggtaagtgcacatagtttacaaggttgtgagcgaatcacgaagagggagttgttctangacatgctattttgttggtcgctgtggttgttttctacagtggcatatttgataaactcgttgcgaaatatcatcttggaaatgcccacaaagccagttcgttgaacaataaaatggattaacttgcgtgg

SEQ ID NO: 4668 - DNA, 457 bp, Cyanidium caldarium
  Clone ID: LIB190-043-Q1-E1-F11
ccgggtcgacccaagcgtccaggcgaaacgtaatcgtttgaagcttgagaatgtggaaacctttttgcaaaaagtggaaaacattcttaaccagaagcaagatgtcattccttcactggtccatggagatctatggtcaggcaacattggttttcttaatacgggtgagcctgtaatttttgaccctgccacctattatggtgatcgggaagtagacatagctatgacagaattatttggaagattgcctgaagagttttatattgcttacaacgatgaatttccgttagcggaaggatatgagcaacgaagaatcatatataatctttatcacgtcttaaatcattacaatctatttggaggaatgtatggtcgtcaagcgaagagtatgatggaagaaataatggagtttatgtgatagtgcttattagttttcaaaagttgacattgtccaaat

SEQ ID NO: 4669 - DNA, 361 bp, Cyanidium caldarium
  Clone ID: LIB190-043-Q1-E1-F3
ccacgcgtccaatttagtcatgtcgtcttcaaatgagtctatcgagacgttattgctaaagacgtttcctaaagaaatccctacttcgtattgtctcgtgtatgcacttttggctattccggtactcgcgctcgacgtgtatttatatcttgccgtactccacttgaactttattgcttcaagcgtttcgttgatcatcggtactacagtcggcttggtgcttctagttacgtcgtatcataaaactgcatatgccaagtggtctaagctcgatcgcacaacagagcaaccaaccaagagctctttcaagggtaatttgtcggcataccgaagtggagttgagagtcacctatggctcctg

SEQ ID NO: 4670 - DNA, 180 bp, Cyanidium caldarium
  Clone ID: LIB190-043-Q1-E1-F9
gacccaagcgtccaaccacgcgtccgcgtctacaagcaatttccatctttttccctcattcattcttacatttcagtagatgtacaatatttttttcattgtcaaaaaatattgcacaatccacccatcgaaccacgaaaaaaaaagcctttcgaggctttctttctacacttttgcaaa

SEQ ID NO: 4671 - DNA, 424 bp, Cyanidium caldarium
  Clone ID: LIB190-043-Q1-E1-H11
ccgggtcgacccaagcgtccgagcctatttgttgatagcccttttttctcttaattgttttttctctagttcagctgtccttgtgaagtactttattgttacccaggttcaatattcccaaagctgcgagtaaggaagagaagcccgcctcaaaacgcgctgtatccccctacaacgaatatatgaagaagatgcttcccgtcataaagcaacaaaaccccaatctttcgcatcaggaagcttttaagcgttgtgctgaaagttggaaagacgctccagagaatccaaagaaccaggcttcagcctaagttaggggttttctttgaattggtgtttctcaacaccaccaggagaaggaactagtctattttatatttcgctttgtgtcttcaagcacggaatatgaggagaggtagacttttgt

SEQ ID NO: 4672 - DNA, 342 bp, Cyanidium caldarium
  Clone ID: LIB190-043-Q1-E1-H5
cccacgcgaccatttttttttttttttttttaaacaaaagaatggagacatatatctattctgttctatagtgagaagcacattgaggaccactagaaagctgcatacgaaacaacaacaacctacacaactaacgacacgagataacttgagacacacaaacacaagcatatccgtgcacacacgccgagttgtgattagccacacacgcacacacaccctactatcgtgctgaaatcaaacctcttaaaacatgtccctgaaatacacagagtttaataaagcagaccttttcgcgttccaaaaaactaggttcaaagcaattggtgaaaaacgtgaata

SEQ ID NO: 4673 - DNA, 365 bp, Cyanidium caldarium
  Clone ID: LIB190-043-Q1-E1-H7
acccacgcgaccacggacgcgtgggggcaacgatgaaagctgcgtcagaaagcaaagctttaaagggaatattggcatataccgaagatatggtagtttctactgactttgttcacaatagtcattcttcgatatttgatgcgaatgctggaattatgttgtcggaaacttttgtgaagctgattgcttggtatgataatgagtggggctactccaatcgtgttgtagatttggtgcaccatatggcgaaagttgatggtgtagcttaactctgcttttcttgttgttttttcgtgtattgtttgttttgtgaaagagatgaaatgtgttgtcttttccataaaaagttgtgtgcgctgtgaaaa

SEQ ID NO: 4674 - DNA, 411 bp, Cyanidium caldarium
  Clone ID: LIB190-044-Q1-E1-A10
attccaaagtcgacccgcgcgtccgagcatgcgaccgcccacgcgtccgcggacgcgtgggatgaacagattcgatatcttcgataatgatgctgtgagaagtttgacagtcctcgtacgtgctgatatatcttcaggatctagcgagtctctttgtctcgtcgaatccaaatgaacttcttgacggcttcgcgacagaaccgtccttggacgtagattgtgcctctaaatgttggtacttcgcagaatgctgtaagcaacggaaatcgccaaagtgagttgaatcaatagtttgcaccttcagtttcagtgtgatccagtacactcatggcgctcttgggaaacatggcactacagagttcaaagaatagacatgttgatgacccgacggtggtgacctgtgctgcctga

SEQ ID NO: 4675 - DNA, 370 bp, Cyanidium caldarium
  Clone ID: LIB190-044-Q1-E1-A12
acgtccagtatgaaaggagaaacgagtgtagcactgtctagtcgtccaactcagcgaaacagcaataactgtgaaaatgcagtaaactagcagtaggacggaaagaccccataattcttgactagataggtttagggaggagagagaatcatgaagtagaggaggtggggtaagagatgaaagaccactgcatgaggataaggaatctaactgagtaaggaaaataagcttaagctagtttggctggggaagtaaagcctaagaaagagtaaattaggcaagcaaaggcatgagagaagtataatagcagaagcatgcttgaagaaaaagaaagagatttcagaaagggaagaaaagtcagctatagaga

SEQ ID NO: 4676 - DNA, 410 bp, Cyanidium caldarium
  Clone ID: LIB190-044-Q1-E1-B9
gtcgacccgcgcgtccgaccacgcgaccgcgacaatgagaaattggaggtttttttgtgtccaaggacacactggatatacacttggagtgggaatggataaggtctcaaaagacaacaactttgtcaaagtaatactagatagtgaccacaacttctctccctgccggttggatatgcgtagcaccgtagagaatggtttgaaggaaccaggtatgcttggaaagaatagctcgaagaaaaccctgttggtggttgcttttgctgtgaatggagttgtgccaacatgcgccagttcgttgcttggtggaaccaaatatatctttaagcagaacaacgagtcgcgtaagtacgctttgccacgtcgaacttgtgcggctgtggtaaatccatcggtcttgaagtgttgtt

SEQ ID NO: 4677 - DNA, 348 bp, Cyanidium caldarium
  unsure at all n locations
  Clone ID: LIB190-044-Q1-E1-C2
gctcttccttaaattctttgtgcttggacaatggttgcaaagactgctctgagttgcctctttctctctttccttatcgctgccgcagttgcagccgacgtagtttcagaagagagatggggatatgctcagcaaacccaacaacagcaacagtgccaacaagtatgtaaacagtatgcatactatcagagtccagtctgcacttccgtaaccacacagagcccatactggacccaatgctcgaagactgtgcanaccctttgtccaagccagtgcaattacttataccaatctcctacatggacctattgcagcacctacaccaccactagcgttacatctcaatgc

SEQ ID NO: 4678 - DNA, 378 bp, Cyanidium caldarium
  Clone ID: LIB190-044-Q1-E1-C6
cggacgcgtgggtaaattcgggtcgtccctcctatgcagtatcagtgtgcagactgtggaaatgttaacgaaatacgtttgggtgaaccagtccgctgcaactcttgtggcggtcgaattctgtacaagcttcggacgaagagagtagttcagtacgaaactcgttgactgcgttgcttgatacagtcctagtactattcacaagccagacgttacgctaggaaagtttctgttggttcggtaaaactcctcggatgatgtgtgcttatttgtgttactgttgcacgactctaaatctaaacccattgatttttgtagtgtttgttgtctcaagttgttaataaaaaactttgcacatagccaaagacttgttccaat

SEQ ID NO: 4679 - DNA, 413 bp, Cyanidium caldarium
  Clone ID: LIB190-044-Q1-E1-C8
tattattactgtcgtggtttggatatttgctatggttattgtttgtggtgcctttgcaggtttgaggaggaatagttgttttccgaataggaggcgtcgcgtttctcgcgaggcgcctgcaccagaacatggagttgcttcggcaaacgataactatagttcgcctccttttgtatttatgtataatgtctacctgccacgtcttgatacagtagcgcctgaaatagtgtacggaagcgaagaatcctttctgaaacaagaacgacagttgaaagaacgctttgtgaagcgttacatgtctcagcgggtattcaaacaagacgaaaaagaggatagtttgtccctatatgtcgattctaccacagtagcggtggaagacggcgccctcagtgggactgccagtagagagaaga

SEQ ID NO: 4680 - DNA, 437 bp, Cyanidium caldarium
  Clone ID: LIB190-044-Q1-E1-C9
attcctaggtcgacccgcgcgtccgacaaaatgaaacggaagaatatttcgtaaatgaagcgacgactttgtagtcattgtggagaagcttttgccaacatttcgataagtagaaagaacaagcacttgtgtcgttgttgtttctacaactacttggaagacacagttcatcaaacaattgttgaagagaagctttttcaaccgggtgaaagaatagcaataggagcctctggaggaaaagattccactgtattggcatatgttctcaagttgttgaacgagagatatgaataccactgggacttgtggttgctatctgtagatgaaggaatacacggctatcgagacgactctttaagaactgtggaacaaaatagagatgattacaatcttcctttatacgttgtatcctatagtgaattgtatgattggactat

SEQ ID NO: 4681 - DNA, 394 bp, Cyanidium caldarium
  Clone ID: LIB190-044-Q1-E1-E11
cacaagtgaaatttgacaaaaggtcggaatttactcccgctgggtatctgaaagtagttgcatgtgattatgtaaggccaatcagcccaaagtcaagttaattttgaagcccaatctttggattacaagtagagatccttgtaactgtcgaaggtcagttacctgtcacgtggatagatagatatttatagagatgtaagcatgttgctgtgaaacagttttgcaacgactagtaatagctatccataaacgacttgagtgtatgtatcgtccaaacacttgcaacaacctggctcgggtttactgaaaaaataatcgagctggcggcttttgaattgctcatcaagtcatgagggcggctgctctagaagatcttgactaaagtcagcgatga

SEQ ID NO: 4682 - DNA, 439 bp, Cyanidium caldarium
  unsure at all n locations
  Clone ID: LIB190-044-Q1-E1-E12
attcctaggtcgacccacccgtccgataactcggacaacacagagcttacggcgagttttcctgtgccaagcctggagaaacctgctaagaaaaagttaaattcgtcaggaagctaccttgtgattggaggttgtttggcaaacgccgctgtattgtttgggggtttgataagttttcgccgtgggaactctcgcaactctcaaatgtttatgcgtgctcgtgttctgacacaacgtgcaaccttggttgcggtagcaggtactttctggagtgcagcaaatatgaaaagganggagagggaacaggcagaagcagccggcgaagagttgggagtagaaaccttggatgaagacaaggcgatggctctcctagaaaagaccggtcgacagaaaagtatgacgtagactgtatagtgttcgaattgtgaaaatggtttta

SEQ ID NO: 4683 - DNA, 163 bp, Cyanidium caldarium
  Clone ID: LIB190-044-Q1-E1-H10
gtccgacgaaaaaaaagagaaaaaggtaagaaagaggaccgaatcacggtaagaggtagaggagcaagaagagaagagagaatgctgggtggagtagcgaaacaagagaagggaagtaaaaggtaagaaagaggaaaggtttacgagagaaggaagtagaaaa

SEQ ID NO: 4684 - DNA, 287 bp, Cyanidium caldarium
  Clone ID: LIB190-044-Q1-E1-H12
atttgaagatgactagatgtcatttttggcaccttttgtgtaacagagttttctcgtgtgtttgtttacctggaacgcgctgttgattgagtgttttcagtcaaatttcgtagtaaacgaaatcattcgatggtttgttagactgactgtcgtgaggattgttttagctcatgccacaaggctttcacatgcgccttataaactatgcataaattgacaaattttgcaaaggtagacacagttttcaagtgaaagatcatggtttgcgagaatttagaatacttgtg

SEQ ID NO: 4685 - DNA, 406 bp, Cyanidium caldarium
  Clone ID: LIB190-045-Q1-E1-A4
cccggctggacccacgcgtcagcacacgcatccggatatcacgagcttaaccattattggggctttttgttgcaaggtcgctgcatacgaaaagactaggattagtttatacacatgacatcatactttgtatcattttgttcctgggtaaattttttatctcccaatgggttgtatgctgggaaaatggttgttttgcatatgtaaccttacttgaaaacgaaccatatatccactcctcgtactacactgtatgttaagcagactggggataaacttggtgaaacttttcacttgtatgttgtgcatggacacctcacagtcaattaagctctgaacctggtggagctattttgagcaaatagccgatagttgagagagagtctcgcgccctcattgagaaatg

SEQ ID NO: 4686 - DNA, 419 bp, Cyanidium caldarium
  unsure at all n locations
  Clone ID: LIB190-045-Q1-E1-B1
cccggctcgacccacacgtcacggggaagaagaggtggcagtggtgctgctagaagaactccgctaaggtcaaaacctcccctttttgcaaaaagagaaagggaagaagcaacaacgaaacagtcttcacgtcctgcgtcttcgctggccaacgtgaagaataatcctacgagtggaaaccaaagagagaagaccaaccaaacgacgacccctccaactcagaagcctagtatgacctcttctctttttgggggaatgctangaagtatgctccccatgtttttatttatgaactggttcaggaggaatcccgaggaaagggaaccagacaaagatgagatagctcagaagaagtgtcagaggcttgcgtgcaatattcaagattgtttggaaaaaaacgactatcagcaaagtatgtg

SEQ ID NO: 4687 - DNA, 320 bp, Cyanidium caldarium
  Clone ID: LIB190-045-Q1-E1-B10
gacccacgcgtcagtgactgctccaggaattttcattggtttttatggaggttttgttactattgcttggttctatgccatgtttatgatgcctgaaaccaaagataagactttggaagagattgatgctttgttttccatgtcgatgcctgatttagcgaaacataattgggataatgtgaagaagacagtggatgatctcttgcattttaggttgagagaagtttggaaggtttacaagtgagcgatgattgttattgtttgattttttgagtactttatttgtttggtaacaataaaagcataaatgcgtgcataac

SEQ ID NO: 4688 - DNA, 403 bp, Cyanidium caldarium
  unsure at all n locations
  Clone ID: LIB190-045-Q1-E1-B8
aattcccggctcgacccacgcgtacgtatattctttgtgcttggacaatggttgcaaagactgctctgagttgcctctttctctctgtccttatcgctgccgcagttgcagccgacgtagtttcagaggagagatggggatatgctcagcagacccaacaacagcaacagtgccaacaagtatgtaaacagtatgcatactatcagagtccagtctgcacttccgtaaccacacagagcccatactggacccaatgctcgaagactgtgcaaacctttgtcncaagccagtgcagtacttatacccaatctcctagatggacctattgcagcacctacacaaccattagcgtaccatctcaatgcagcaaggccgtgactacctatattcaaacctgctgtgc

SEQ ID NO: 4689 - DNA, 318 bp, Cyanidium caldarium
  Clone ID: LIB190-045-Q1-E1-C12
gacccacgcgtcaggtgattgttgccatggttttgtttgacatgatttcgaatctgatagaaaacgctcgagcaccaacagagcaagaggtggagcaggaagcaaatgacaggatttatcgacgctaatgaacaacatgacctggtgcgatatatgtggagttcacctgtgaaaccaccatactggtggaagtcggatgcctttcaagaacattataagcaattgtgtcacagacataagcagcgcctcaagacccctgcagagcgaacgccagaagatatgggagaaatgtacagatcgaataacctttgttaccgc

SEQ ID NO: 4690 - DNA, 237 bp, Cyanidium caldarium
  unsure at all n locations
  Clone ID: LIB190-045-Q1-E1-C2
ccacgcgtcagccaacgcgtccggaaagaggcaaatacgggaaagcagtaaaagaagaaagagaaaggaaaaaactgagtatcaggaagaaaagaaggagtanatgaggaaagaaagataaggaagtaagagtaagagaaggagtaatgtgaatgaaagcaggaaagtatttgaagaaaaaagtgtaaaccgcgtaccttttgcataatgtcccagcgagtgaaagaggaaccaaaa

SEQ ID NO: 4691 - DNA, 419 bp, Cyanidium caldarium
  Clone ID: LIB190-045-Q1-E1-D1
aattcccggctcgacccacgcgtaaggagcgagaggcaaggtgttatcatggcaaacgcagtgagaattggtgctgaaggttacaggttaaagttggacggtgcagttcaagagatagacggtcgttctgtagttctggtagatgtggatagtattacccctctcatgtttggaggtagtatgaaagaaaaggccaaattgttggatgccaagtttcgaaggaagtattatgaggagaacaaggacttcttcttcttgtcgactagagaagataagaaaatgtttgtgacgttgcaacttgccagggaatatgcagagctggtagatgaccaattcttgaagggcttcttcgagaatgctctggagtccgctcagaagacgtattaatttgtcaagtagtgtgtatgtatgcgtttgaa

SEQ ID NO: 4692 - DNA, 112 bp, Cyanidium caldarium
  Clone ID: LIB190-045-Q1-E1-D5
acccacgcgtcagaacacatgcaagtaggtaaagcgaacgggtgagtaaagaggtgtgaaagagtggaagaacatgaaagcacagaagaatgtaagaaatggttagagtaaa

SEQ ID NO: 4693 - DNA, 52 bp, Cyanidium caldarium
  Clone ID: LIB190-045-Q1-E1-F10
acgcgtcagggaatatacgggaaagcagtatgagatgaaagacaaacgacaa

SEQ ID NO: 4694 - DNA, 230 bp, Cyanidium caldarium
  unsure at all n locations
  Clone ID: LIB190-045-Q1-E1-F5
tcccggccgacccacgcgtcagagaaatccgaaaggagtaaaaaaaaagaaaaagaagaaagaaaaaaagagaaaagccgtactgaagaccgacacaagtactcgangagaaaggagacccanattaaggtgagagaatggacgataaggaactaagcaaaaggatatggtatctgcngtagaacatatgaaagaaacagcaacgactgttttaacaaaacacagcactc

SEQ ID NO: 4695 - DNA, 253 bp, Cyanidium caldarium
  Clone ID: LIB190-045-Q1-E1-G11
acccacgcgtcagcgaacgcgtgggcggactcttgggttggaaaaagatttggaaaaaatggaataagggttgaaaggcaattcaaacctattgaaacctggaactcctcgaaagctatataagtagcgtatgcaggaaagaagaaggtaaaggaagagaaggaagaagcacatagggactatgagcgataaggtggatagtcgagacggaaaaagcccagaagccaagataatgtatcaaagtaaagaatga

SEQ ID NO: 4696 - DNA, 274 bp, Cyanidium caldarium
  Clone ID: LIB190-045-Q1-E1-H11
gacccacgcgtcagcggacgcgtgggcggacccttgggttaacgttacctaatggattggtggatggggcaaactcgtggttgggcttccttttgggaaacaaaaaaaagtcgtctctggaaaaatggcaagtagagtaccttggaataactttcgtatgcctttggtggtggtggcggtggtggtcctagtggtcctgcggttcgagttgcaggtttggctattgcaggtatcgctacagctgccattggttataaatatggtttatacaacg

SEQ ID NO: 4697 - DNA, 378 bp, Cyanidium caldarium
  Clone ID: LIB190-045-Q1-E1-H5
agcccacgcgtccggtaaagtatagagtgtgcggcctgccaaatagtagagaagaaatcgatgaaagtgaaagcgagtaaaagatgaggtatagagaatggcggtcctaacggtaaggatccaaaggtagcgaagtaaatagacgtttgaaaggcgtccagtatgaaaggagaaacgagtgtagcactgtctagtcgtccaactcagcgaaacagcaataactgtgaaaatgcagtaaactagcagtaggacggaaagaccccataattcttgactagataggtttagggaggagagagaatcatgaagtagaggaggtggggtaagagatgaaagaccactgcatgaggataaggaatctaactgagtaaggaaaat

SEQ ID NO: 4698 - DNA, 108 bp, Cyanidium caldarium
  Clone ID: LIB190-045-Q1-E1-H7
agcccacgcgtccggaaaagtttttgaataaagcagcaatgccgctctatcatcgtaaaaaaaaaaaaaaaaattaaaataaaaaaaaaaaaaaattaaaaataataa

SEQ ID NO: 4699 - DNA, 364 bp, Cyanidium caldarium
  Clone ID: LIB190-046-Q1-E1-A10
aattcccggctcgacccacgacgtcagggatttgttgtctcattcgagcgacgaatcaacttgtagtgcagcaagacaagaaggaaatatttcgtcgggtagattatcgccaactgcagttgactctacttgttgttgtaacaactggcaacttgctcaagtgtctgaacctatcgctacggttgaaaatattatatgcgatgatgaagccaagtcgattttacgagttttggagcaactttctggcagcaccactatggaaggaagaacagataactcttttgaattgtcgagtactttggaagagaaagttgtagaagatgaaaacaagcaagccgatggtgctccgtctcccagtgttgtg

SEQ ID NO: 4700 - DNA, 195 bp, Cyanidium caldarium
  Clone ID: LIB190-046-Q1-E1-A11
gacccacacgtcaattcttgactagataagtttagggaggagagagaatcatgaagtagaggaggtggggtaagagatgaaagaccactgcatgaggataaggaatctaactgagtaaggaaaataagcttaagctagtttggctggggaagtaaagcctaagaaagagtaaattaggcaagcaaaggcatgaga

SEQ ID NO: 4701 - DNA, 453 bp, Cyanidium caldarium
  Clone ID: LIB190-046-Q1-E1-A6
aggtaccaggtcaggaattcccgggccgacccacgcgtcaacggacgcgtgggtttatatgttgtcaggcagaagcgaaatggatgcttccacagcagtatggaaaaataatcaacactgcctccatgtcagcacatattgtgaatcatcctcaaaaacaggccgcctataatgcagccaaagcaggtgtagtacaacttaccagaactttgggagcagaatgggctgatcgaggagttcatgtcaattgcatttcgcctggttatattaatactcctattacgaatactcctgccttgaaaccggtcatggactattggattcgactaactccagccaatcggttgggtgaagttgaagacttgcaaggtccagtagtgtttttagcaagtgatgcttctagttttatgtttggtggagaaattattcctgacggaggctttactctttggt

SEQ ID NO: 4702 - DNA, 205 bp, Cyanidium caldarium
  Clone ID: LIB190-046-Q1-E1-B1
aggtacaggtcaggaattcccgggccgacgtacaaatcaaagtcaacctggcttgcctcctgatgaaaacgggaagggaaggaacgtttccaaaaacctttgcgctcaacaagctcctcgggcgaagacatgttacgaagtttttccgcctcctttccaaccgggaaaaccttaatccccaatggaccggaacctgaaacctttt

SEQ ID NO: 4703 - DNA, 365 bp, Cyanidium caldarium
  Clone ID: LIB190-046-Q1-E1-B10
cgacccacacgtcagcaagtatttgccatagaagaagagaaaaacaagggctggttgtttttatctagtgctatttggatacaaacccgaggaagaattggaatatggagatattgtgggaactggtatagctagagtatcgttgtgatagcgtgttgtatcccgactcgaacaactttacatggcaataaaagcagttgttcaaggaaaaaaaaaaaaaaaaaaaataaaaaaaaaaaaaaggcggacgcaccaaaagaatcaaactttcgttagcatgcatgctacgtcatagactcttcaattctgtcacccaagttcaatttaatggacgtccttttacaacatttttactgggaaaaccc

SEQ ID NO: 4704 - DNA, 352 bp, Cyanidium caldarium
  Clone ID: LIB190-046-Q1-E1-B11
cccggctcgacccacacgtcagtgccaaagtgcagcaacaagtagatgaagttacttccgttatgaggtccaatatagacgaagcactaaatagaggggagcgactcgatgtgcttgttgacaaagcggaagatttacgaggcggtgccagtcaatttcaaaaatcttcaacgcaacttaaacgaaacttttgtaaacgaaatatgaaggtcatcatttgcattgtaatagttgttcttcttattgcccttgctatcatccttggagtagtgttaacgcaacgaaatagcagtagtagtggaagccgtagtggtggaaacactagtggcaacacaacgagaattttatacta

SEQ ID NO: 4705 - DNA, 440 bp, Cyanidium caldarium
  Clone ID: LIB190-046-Q1-E1-B6
attcccgggccgacccacgcgtccacccacgcgtccggaagtgggaatagtatttggaagtttggtgaatgcatatgcaaggaacccagtattgaagcagcagttatttggatacacgatattagggtttgcgttaacagaggcagtaggactgtttgcattgatgatgagttttttgatactgttttcatagtataggagaaacaagaagtagaagagaaataaaagagacagaagaggagttatgagagaaaagatggaagtaatagaagtggtaagtggagtaataatgaatcatatgaaagaacgaatggagaatataaggaaggattacatgaaggaggagataatacgagaaatgataaggtggatatatatatcgataataagtgtgatagtaatatacaggacgagaaagagacgaaagacgtgtatgatgc

SEQ ID NO: 4706 - DNA, 443 bp, Cyanidium caldarium
  Clone ID: LIB190-046-Q1-E1-B7
ggtacaggtcaggaattcccgggccgacccacgcgtcagagcaagcgtgaaccgtgagggtagttcatcatggttgagacaaaacttcaagatggtgttagtgcttctctttggactgttcgtctcttcctctacacagttattttagcattctctgccactatcattggcttgaatggacgtaaagcagacaacatatggaacgacagcttattctatgatgggaagtacattaacttttgtgcttattctgcctcttctgttgtagaaggaggggaccatggagcgtgtaaatatgtcatggcgttggcgtctataagtttgattctagtctttttcttgtggctttttacatttgtagatgcgttgtatcctattcttaccaagttttggtttattgaattgggtatcaacgtgtttcaaacaatgtggtggttggttgg

SEQ ID NO: 4707 - DNA, 422 bp, Cyanidium caldarium
  Clone ID: LIB190-046-Q1-E1-C2
ccgggccgacccacgcgtccacggacatgtccttttcatacccaccgtcagacgacgacaataaccagcataacttggctacaactagtagcgtgtttgatactggtaatgacccattttctactagcgagggaagcgagtcacctactttgggcattggacacttggacagaattaaacctttgaacactgcacctgcgttgggtgtctaagcgcctggttaatggaactctccagaatatttgtttgcggaagactataccgacgatcgtaaaaagtcttggggagaacagctcatgtattggacaggactttcttatctgactggtgcagtgactggtggttcgtatggacacgtagaacgacttcggtcatcacgtggcacaagttgggaactacgaattaatgctatattgaatgca

SEQ ID NO: 4708 - DNA, 348 bp, Cyanidium caldarium
  Clone ID: LIB190-046-Q1-E1-C6
agaacaaactacaaaagaaacaacgaagatggaaacaaaaaggaaaatatcatagaagacgtgggaagaaatgagctgcacaatatttaattcctgcttatgtacaaacttcatattacatgattactagaaatgtttccttgaataaattcttacgggtaatcccaaaaaaaaaaaaaagaaaaaaaaagaaaaaaaaagaaaaaaaaataaataaaaagaaaaaaaaaaaaaaaaaataacaaacaaaaaaaaaaaataaaaggggcggccgcccaaaaggttccaagcttacgtacccttgaatgcaacgtcaaagtccttcaaaagtgtcacctaatttcaatt

SEQ ID NO: 4709 - DNA, 353 bp, Cyanidium caldarium
  unsure at all n locations
  Clone ID: LIB190-046-Q1-E1-C7
aattcccgggccgacccacgacgtcaggttgctttattttgatcctttcactgaagaagacttcactttacgtcaatgtctttctgtttttttccctattttcgcagtttcttttctcgacaacgttttggttatagagaagtgtttctttagtgtcatcaacactattttggatgcacctccttccaagtcgcttagtgaagcttctgtcgttcaagttgcagagtatcttctctacttgacaaacgcttctatttcctatcatagaaataaagagtccagcgatgtttatgaacaggtggttcatgttcatgagagaatttgttgccgtcttcntcatgctattatagacg

SEQ ID NO: 4710 - DNA, 377 bp, Cyanidium caldarium
  Clone ID: LIB190-046-Q1-E1-C9
tcccggctcgacccacacgtcagggcacaaaaggatagacaagaaacagaattggataaagcctcggagacttgtccttgtgttaagggttgtggctactatggaacatcgtcgaccttgaatatgtgctctaaatgctacagagaacaccaacgtcaagagcaacaaggacaaatggaatcggttggtccacaacaccagcttcaagaagagtcgttagacaaagcagaagaccgtttgcaaaatactacggaccttaaacatgtagatctccaacaagatacgtgtgtctcagaagctataacggggcagtcggagttgcaattggaagataccgctggggcttcccttgaagcaaatagcaagacttccttttc

SEQ ID NO: 4711 - DNA, 441 bp, Cyanidium caldarium
  unsure at all n locations
  Clone ID: LIB190-046-Q1-E1-D1
ccgggccgacccacgcgtcaaggaatacaatcccgtaaaatttccccaagaagggcttcggaaccaattctgttggtccaaacataggcaggtacccaatttccaattgtccttcattctcagaaatacttcaagcgtcaactagactatctgcgttgctttctagaatatggaaaaagttcttctcagcagtattagcatccacanaactagactccatatcaatccagtctgattccgtcttgcttctatctatatcactgtccaagttgctctgttgttgttgtggtggtgtaacagacacgctacgcctatcgggtaaagcaactgtaacgctctttaaaggcctcttgaacgttgggtctcccgagatttgtcgcaaagtaagagataaactaagaactgcattcgtacgactttcttggagcaaaaaatttttac

SEQ ID NO: 4712 - DNA, 267 bp, Cyanidium caldarium
  Clone ID: LIB190-046-Q1-E1-D10
aatgcccggctcgacccacaagtcagagtatttggaatgcctgaaaaccaagtgtttattttaagaggaggattggaggattggaagaaacatggctatcctattgccagtagccacgatgataatagttggatgccatccgagaccaacaagacttttgttgcacgatatcaaccacagtttgttgccgattagttgctaataaaagagtatgtccagtctccaagagattgtgtaatattggatgctcgttcctctggtcgtttt

SEQ ID NO: 4713 - DNA, 408 bp, Cyanidium caldarium
  Clone ID: LIB190-046-Q1-E1-D12
aattcccggctcgacccacaagtcagcgcgtctggccgaatgaaaactgcggtccttgggaagaactttatggcattcacttttttgatcaatatctgcagaggactgctcttcttcgaggtaagtttgattttcagtgatagataatagcagccgaggaataatcatttttaggtgtaaaacttgctgaaaaacttggttataacaatattgccaaacattatcaaagggcagcggaaaacattactcaagtattgccatcctatattgcaaaggactttggcatcgtttgggaatctgtcaacactactcacgacaccaatcatgaaacctttttggatacatcgactatcttgggaattcttcatggatacaatcacgaagaagtatttgcccccaacaatgaat

SEQ ID NO: 4714 - DNA, 442 bp, Cyanidium caldarium
  Clone ID: LIB190-046-Q1-E1-D3
cgggccgacccacgcgtccagtcaacgtcgatttttccttcgacttgggggccaatcttcatcttcttcttagaatgaaattgagtatcgcgaatcccgctactggttgtcacaagcatatataagtggacgacgattgaaaacttcatgcgttttttgacaagagactggtgcaagaagtcacaggagacgctctaagatacgactttaacggatatattttcaagatcatgggtggacaagataaggaaggattcgctatgagacagagactcttgaccactggtcgtgtaagactcttattaccgaaaggagactctggttgcctagggtactgtatgagagactgtgaaagaagacgaaagatcgttcgcggttgcattgtatctccatatatagctgtgttgaacctcatcattttgatgaaatgcaattacgatat

SEQ ID NO: 4715 - DNA, 439 bp, Cyanidium caldarium
  Clone ID: LIB190-046-Q1-E1-D5
aattcccgggccgacccacgcgtcagggtttatggaaacgctcttcaaattgtaaagtatttggaacaaaatccatcgtcatgactagtacaggaaggaatattgcgaagaaaatacaacctcgagaacaaatggacggtgaaggagctcgtgtttttcgttcgattggtactgcttcccttcgaaaccttgaccctttcctcatgttggatgagttccgtgtccaagcaccagcaggttttcctgaccatccacatcgagggtttgagactgtcacttatatgttggagggttattttacgcacgacgataatcacggacactcgggagttatacggccaggtgatgttcaatggatgactgcaggtagaggaataattcacagcgaaatgcctcatgggaaacaagaaggtcatgggttacagctttgggtcaattt

SEQ ID NO: 4716 - DNA, 443 bp, Cyanidium caldarium
  Clone ID: LIB190-046-Q1-E1-D9
aatgcccggctcgacccacacgtcagcacggtttggttgcattccatgtcaaatcgctcccgcttgccttcaggtttgagaagtgtgcaactcgttccagagcaggaagatgcgacaactttgcaactaggagaagacttttcgagtgaaaaagcccagccacttactattagtgaagtttttattcttttgtctcgaaagagagatatgatgcgagagttggaaggcccgagagcagatgaattttcaagtgtctttaagaaatttttggaatatgtagagcgctttgaccgttacaagggtcttgaagctgcaaccaacgtccgaaacctgttgcaacgatatgataatttggatccctttgaaatggcttgtttggctaatctttgccctgcagatgtatgaattatgttagtttcgagggtttaaactgaagttgttgt

SEQ ID NO: 4717 - DNA, 427 bp, Cyanidium caldarium
  Clone ID: LIB190-046-Q1-E1-E11
aattcccgggctcgacccacgacgtcagcccacgcgtccgatgaaattgaaaccaaaaatactgcgcttaagaagaaatatgttttcttgtattatagctatgaatttgtctggtgatgaaaaggaaccagagatttccaatgttcgcctattttttctccgtttattagtcggacttttgtcaagcagtacacgagtcgaccaagatttaaaagaagcttttgaaaaagaattcggaggggacaccaacttttccctaaatcgctatgtgtgctggcgactaggttaccaactggacttgttggggaattcacctagaaaacaattattatatggtcctatggccatgttattcggttttacttgcgcaagtaatctcactctgattttcggagcgctctcctttctggaccctatgaatgctgga

SEQ ID NO: 4718 - DNA, 326 bp, Cyanidium caldarium
  Clone ID: LIB190-046-Q1-E1-E12
aatgcccggctcgacccacacgtccgatttgttgattatcgcaccattttgtggaaaggatgagtaactcggacaacgcagagcttaggccaagttttcctgtgccaagcttggagaatcctgctaagaaaaagttaaattcgtcaggaagctaccttgtgattggaggttgtttggcaaccgccgctgtattgtttggtggtttgataagttttcgccgtgggaactctcgcaactctcaaatgtttatgcgtgctcgtgttctgacacaaggtgcaaccttggatgcggtagcatgtactttctggagtgcaacaaatatgaaa

SEQ ID NO: 4719 - DNA, 415 bp, Cyanidium caldarium
  Clone ID: LIB190-046-Q1-E1-E5
aacccacgcgtccgcccacgcgtccgcggacacgtgggcggacgcgtgggttttgtggttttcttgtcctcgacgcggattggaggccttttcttccttgcgtcatcatggtatccaaaagtagggacgtacctctgagactaaaagaaaaggcggcaaggaaagaagcacagttgaagaccatgtctgataagccatcgagagccaaagatgaattggtacccgacggaagacataccgaaagtagaatttttacggaaaaaatcgcagaagcgtaccaagttgcgggcatccatcacgcctgggacagtcttgatcctcatgtctggccgcttccgatgaaggagggttatctttctgaaacagctcacaggtagactaatattggtgacacgaccttttgacttgaatggcg

SEQ ID NO: 4720 - DNA, 448 bp, Cyanidium caldarium
  Clone ID: LIB190-046-Q1-E1-E6
tacaggtcaggaattcccgggccgacccacgcgtcagcaacaattggttgtgttgtttgggctttttgttttggggtttgtttgggtgaagatggcgcactatcaacattaccgagctagtacagcgggtatagctttgggagaagcactttctgaactcaaggaacagaacctctttacggaagcggaagaagatgtgatttggaggaagtttgaccgtgccatgacagaagcccttgcgtccaacgttgtggatacacaccttacgttgaaagggagtcttcatcactatcgattctgtgataatgtgtggcaattcttcgtgaaagacgcacaagtgaaatttgacaaaagttcggattttactcccgctggttatctgaaagtagttgcttgtgattatgtaaagccaaccaacccaaagtctagttaattttgaagcccaatc

SEQ ID NO: 4721 - DNA, 196 bp, Cyanidium caldarium
  Clone ID: LIB190-046-Q1-E1-E7
ggtactagtcaggaattcccgggccgacccacgcgtccacccacgcgtccgcggacgcgtgggtttgattttctctttgggagccgatttcgccgtcgttgccaaggattgaaatactgaagaagtccttttcgtaccaaaattgcattgtattttgaacctttggataataaaagccaggaacaattggaacttc

SEQ ID NO: 4722 - DNA, 462 bp, Cyanidium caldarium
  Clone ID: LIB190-046-Q1-E1-F1
ccgggccgacccacgcgtccacatgaacatttgttcattagagattaacacgcaagcaaatgaaaggatatcaactttccaaatccctttaacatatagaagccaaagggagaagcctcccttggtcaaacctttaaggtacaagccaattcacaaaggcatctttctgcagaagaagaatggctattacttaatcaattagactggataaagtcgtggggtttccggttctctgtggatatggagaaaatgcctggaaatagagtttgcttagtacaagtgccatttcatgataaagcaacgtttggagtggacgacgtattggaaatgatccatcagttacgaacaggagaagcagtgaaccaacagcatattcgttttcctagattggaagcagcgtttgcttctcaagcttgtcgcatgtctgtaatgataggaactccattagaccgctcgcacatg

SEQ ID NO: 4723 - DNA, 431 bp, Cyanidium caldarium
  Clone ID: LIB190-046-Q1-E1-F10
aattcccggctcgacccacacgtacggataaagagtaaatatgtgttgcacgggtaccgtagcaaccgcttgttcgtctggccagctggtcgtgtcattgtctctagcgtaagttagctccgtctaacaagactaccaagccaccttggagtcgtcctgagtttgtatcgattggtaactcaaatttactttaaaaaatgtgacgcaaggacggttaggctttcatcttttcgttttttcgtctttggtttttcctgctataacgcggtgctcaagaaacttagagtgaatccgaaccaaacgagcgatgttttgctgtgacagatccattaggaagttgaaatggacagacgtcctttggtccttccaatgcccaacaatttgcaaaagagatccgctcatgccataggacaaaacaactagtcactgag

SEQ ID NO: 4724 - DNA, 302 bp, Cyanidium caldarium
  Clone ID: LIB190-046-Q1-E1-F12
cggctcgacccacacgtcagcccacgcgtccgaagaggtgtatgatgcaggcaaagaagtgacacactagatcagagagtaacacatgcaagtatgtaaagcgaacgggtgagtaaagaggtgtgaaatagtgggagaacatgaaagcacagaagaatgtcagaaatggttagagtaaaaaccatataagaagtttaagcgggaatctgagacgaggaaagccacattgggactgagaaaaggtccaaacaagagaagtcagcagtggggaaaattgggcaatgtacatggaagtatgaccc

SEQ ID NO: 4725 - DNA, 444 bp, Cyanidium caldarium
  unsure at all n locations
  Clone ID: LIB190-046-Q1-E1-F4
gggccgacccacgcgtcaggccatactgaagaccgacacatgttctcgaggagaaaggagactcaaattaaggtgagagaatggacgataacgaactaagcaaaaggatatggtatctgcggtagaacatatgaaagaagcagcaccgactgtttagcaaaaacacagcactctgcagaaaagagaacatgtaaagtatagagtgtgcggcctgccaaatagtagagaagaaatcgatgaaagtgaaagcgagtaaaagatgaggtatagagaatggcggtcctaacggtaaggatccaaaggtagcgaagtaaatagacgtttgaaaggcgtccagtatgaaaggagaaacgagtgtagcactgtctagtcgtccaactcagcgaaacagcaataactgtgataatgcagtaaactagcactangacggaaagaccccataat

SEQ ID NO: 4726 - DNA, 316 bp, Cyanidium caldarium
  Clone ID: LIB190-046-Q1-E1-F6
ttcccgggccgacccacgcgtcagctcaattggaacaattttgtgaaattattcgacctcatctaccatctttgaaatcgacgccatatgggaagcgtatttatagtaagatagttaggcgatttccggaaagcagtagttgacgatgaaatatatatatatatatatatatgatcgacgatatcgagaatgtgtaggaaattgtattgattagaaaatgctttgaatattcaattttttttgttttgctgtaaaaaaaaaaaaaaaaaaaaaaaaaaaaaaaaaaaaaaaaaaaaaaaaaaaaaaaaaaagaaaa

SEQ ID NO: 4727 - DNA, 411 bp, Cyanidium caldarium
  Clone ID: LIB190-046-Q1-E1-F8
gaattcccgggccgacccacacgtcaggttttgggtgtgtgtccaccaaaagggtgaagatgcaaatattcgtcaagacacttactggcaagaccattactttggaagttgagccttccgacactattgaaaacgtaaagtccacaatacaagacaaggagggaattcctcccgatcaacagcgtttgatatttgcaggcaagcaattggaagatggaagaactctatcggactataatatacaaaaggaatctaccttgcacttggtgttgagacttcgtggaggagctattccagaaggagatcctactcgcggggagaagatattcaagacaaagtgtgcgcagtgtcatacttatgaaagtggcggtattaacaaacaaggccccaacttgcacggtctatttggga

SEQ ID NO: 4728 - DNA, 411 bp, Cyanidium caldarium
  Clone ID: LIB190-046-Q1-E1-F9
aattcccggctcgacccacgacgtcagactttttatttaggtgtcaccaacttgcaacgagactgggaaatagaacaagtgtccagtcaatctgtgcaaacactcttgtgccaaatacagagggtctggatgagtcactatcttctcagaatgttttgaagcatctttccttgggagagaatgtcgtctcgagttttgtgtgtagaaagagcgtttcaactcagaacaactcaccctcgaggtagtgacgccacaaaggacgataagcttgtcatatgtagactagctttttgggaagaattcgacaagtttgtttcaaaatgtccttccgtgaatttttgttcagctcgatgtggaagagacaagagagaacactttatttcaaagcagagctagtactactgctgctga

SEQ ID NO: 4729 - DNA, 436 bp, Cyanidium caldarium
  unsure at all n locations
  Clone ID: LIB190-046-Q1-E1-G2
ccgggccgacccacgcgtcaacaaacatgtccttcgctattcctgctgttgtttctaccggagcagggctatcttttggtgtacctgcttcaattgcaaacgcttggtctgacctggatcaattatgtagtggcaaggatagagcgctcctgagtttgccccaagttttcaaaagttccaaagacaagggcaatcttctcgctcgtcaaggacaaggttctattgaagccccaggtaaagctgacagaattgcaagacaaagagcaggacgtatccgtagtgtcgaagatgacgtcgtaccagaggaacccaactttctagcaaaggttcccaaacgggagcgagatgggagagcagcttttcgtccttcaaagaagtcaaacccgttctcnctcggagccactttagaagatgtccttctcaaaattccgaacag

SEQ ID NO: 4730 - DNA, 444 bp, Cyanidium caldarium
  Clone ID: LIB190-046-Q1-E1-G5
aattcccgggccgacccacgcgtccacccacgcgtccgcgaaacagcaataactgtgaaaatgcagtaaactagcagtaggacggaaagaccccataattcttgactagataggtttagggaggagagagaatcatgaagtagaggaggtggggtaagagatgaaagaccactgcatgaggataaggaatctaactgagtaaggaaaataagcttaagctagtttggctggggaagtaaagcctaagaaagagtaaattaggcaagcaaaggcatgagagaagtataatagcagaagcatgcttgaagaaaaagaaagagatttcagaaagggaagaaaagtcagctatagagaacaggtgaaggagaactcaaaaagaggagagcaccgaacgatcgaagaagaaactttgggggtaacaggttaatgtggtgttagagaacg

SEQ ID NO: 4731 - DNA, 446 bp, Cyanidium caldarium
  Clone ID: LIB190-046-Q1-E1-G6
cccgggccgacccacgcgtcagagggccgtctcctgtgggttgcctctttgtgtgtcttgcaaagaaccgcacaaactctatgagtcatacacccgacttttactgggcacaacgcaaagacaaactgtttcttaccatcgacgttcccaacgtggacaaaaaccaagtttctattgagctcacagacgacggtaaacttagttttaaaggtcgaggtggagagttgcacgaaaaagcggactatgaactccacttggaactgttacatcccatcaaggcagaggagtccaagtattctgtgacagctagaaatatacggtttgttattgtgaaaaaggaatcggggtcgtattgggaaaggttgttgaaacaaccggggaagaacatctactgcaaagtggactgggaacactggaaggacgaagactccgaagatgaattcgac

SEQ ID NO: 4732 - DNA, 432 bp, Cyanidium caldarium
  Clone ID: LIB190-046-Q1-E1-G8
ccgggccgacccacgcgtcaggaaaaggggagaagatggcaggtatttgggccaagtacaacgcagcacttaccgcaaaccctttgaaggtgaaaaccttaacatccttttttggttttactctaggagatttgatagcccagtcccccgacatgttgtcagggaagccttgggattatatgagaactgcccggttttcagcttttggtttgtgcatacacggtccgatcgggcactattggtatcagtttttagataggacggttatgaccaacgcgcccaagtccgggatcgcagttgccactaagacagcaatagatcagcttctttgggcgccaatatttacttccatatttttctcctttatgaaaactgtggacggccaccctgatcaggtagtacatgaagtgaagacaaagttgtggccaaaca

SEQ ID NO: 4733 - DNA, 253 bp, Cyanidium caldarium
  Clone ID: LIB190-046-Q1-E1-H6
tcccgggccgacccaagcgtcagcccacgcgtccgcccacgcgtccgcccacgcgtccgcccacgcgtccgcccacgcgtccgcccacgcgtccggagcgagaaggtggatagtcgagagggaaaaagcccagaagccaagataaggtatcaaagtaaagaaagaaggaaaaggagaagaagagagggtacgcttagaagcagcaaaccagagaggaaagcgttaaagcatgaaagaaaagaaatccgaaaaa

SEQ ID NO: 4734 - DNA, 442 bp, Cyanidium caldarium
  Clone ID: LIB190-046-Q1-E1-H7
attcccgggccgacccacgcgtcaacccacgcgtccgcccacgcgtccgcccacgcgtccgcccacgcgtccggaaattattagaacgacagaaagaaggcaaagaaaaattaagacaattgggaaaagttcgtctgtcaccggaagcttttgcagcagtagttgctcagaaattttaagacaagaaactttattcttataagaatctttttgatattttcagggatgtatagcagcaatgtccttattactagacctgaggataggtcgaagaggccgtggatacattggtcgtgttcaacttggtttgactttgtggactcaacgatagtcttacgtgtatccctgcctttgaatatttataaactattaggagtaaaagcatcagagaaccaatcaaggataaccaagcaaatgctactgatactggagtattgacact

SEQ ID NO: 4735 - DNA, 357 bp, Cyanidium caldarium
  Clone ID: LIB190-046-Q1-E1-H8
tcccgggccgacccacgcgtcagggtggaaaggcacgaacgggtcttgtttcaaaccgccaccatatggagaattataagaagacagaagttttgggagaaggtacttatggaaaggtgtataaagctcaagatattagaacaaacgaaattgttgcactgaaaaagacccttttggtaaacgaagacgaaggcgtccccgcaactactctgagagaagtgtctatcttaagagcactttcagattgtccctacatcgtaaaactatctgacgttcttcacactgcatccagaaatggtaaacctgtgttgtacttggtatttgaatacttggaacacgatctcaagcactatatga

SEQ ID NO: 4736 - DNA, 357 bp, Cyanidium caldarium
  Clone ID: LIB190-046-Q1-E1-H9
aatgcccgggtcgacccacacgtcagcccacgcgtccgcccacgcgtccgcgccaaaagctggaagtgagcgcttcgctgatcctgattgcgagcactaactgtttgtagcttttttaccgtcatgtggaactgttgaggctatgtggggctcagaattgcaaattatggaagaagaaggtgatgaagacggctactcgacacctacttcgcaaacaataagagtctatccagataggccacccccacctcctagaaagaagaggtataagaagtcccgtaggatgggcaagaacttggagattggagatagtgagttgcagtgtaagactctccttgattcggacttgtctgtttc

SEQ ID NO: 4737 - DNA, 412 bp, Cyanidium caldarium
  unsure at all n locations
  Clone ID: LIB190-047-Q1-E1-A4
gacncacgcgtcagccaacacgatcggaccactcgtccaacacacagcataactggcaatggcactgtgcacaatcagactgtagacaatactgttgaagaatattgatcatgtaatgaaagtcattctatcattgacacggaatttgaccatccttttagaccattaccgaggatagagggacattacgatggcctgctgccaagtgacgaggcttctcgaatagacctgcactaatgtcgtgcgaacactctgtagtcatccgtctcaagttttgatcaaataggtttatccaacgtgttgttgcacagactagtctctacgacctatccctagcctagtatgtcatatgtaacttcactgtcacgcactggtccacacgcatccaatatcttaatcagtcaagcataga

SEQ ID NO: 4738 - DNA, 402 bp, Cyanidium caldarium
  Clone ID: LIB190-047-Q1-E1-B11
acccacgcgtcagcccacgcgtccgtacaaatttggtcatgttccttgtcgttggtagacttgcaacattctatgcaaagaaacaactttcggcatgcgtttcagttattcctaaagtaaagtactgtggagaatgtagaccttgctgtaaaaagtttagttacaacctggtgaaacgttccattcgtttctatggttgttccagtggaccgtcctgttcggaaaccacagggtcgtctgctacgaaatcttttgaagtaaatcagagtgaaccaatttttattacccgagtcaaggaacttgctgaagaatctgcccttgagttgagcttaactattcaaagcgttcgttggaccggtgggaaactagtagtacatattggtcacgcccacgcagagagga

SEQ ID NO: 4739 - DNA, 422 bp, Cyanidium caldarium
  unsure at all n locations
  Clone ID: LIB190-047-Q1-E1-B4
cccgggccgacccacgcgtcagcggacgcgtgggcggacgcgtggggaaacctatgcaactgccgtaagggcaaccttacatggtgtctcggcagcatttggcaaagctggtgctgccattggaacacaagtattcaatccactgaagaagataagtccagtgaatggaccacgtgctgtgttcattttctgtggtggtctctcctttattggagctatcttgacttatatttgcatccctgataacaagaagaagccattggaggttctcgatatggagtttgaaaggtattgtctggagcacggcgtggaattgaagtacttgcaaccatcccattattcaaagtactttacttcgagtgactctgatgagaaagctcgcatgaatgagaatgaaacagaagataagggtantgttgccg

SEQ ID NO: 4740 - DNA, 421 bp, Cyanidium caldarium
  Clone ID: LIB190-047-Q1-E1-C10
cccggcccgacccacgcgtcagcaaaaaccctggggtggaacaaagagcaccgaaagacacccaagcgatgaccgtacaagtcaccgacactttggaaaagaaagccactttatatcaacaactttgtgaagctggagtggatgaggattccgagtatatggtagattttgaacgcaagtatttggataatgaagaacaaccaccaactcaagtatcggattggatggttgagtggaaagtggcagattcgaaacaaagtgacgaaaacccatcatcggatgcatttccttgtcatatattaccccattcggatatggaaacctatagaaagttgggtgcggaagagtggaatcgtctcgtagatacaaccttgtggtggaagaaacatggttttctatttggcggtattcctaaagaaca

SEQ ID NO: 4741 - DNA, 339 bp, Cyanidium caldarium
  Clone ID: LIB190-047-Q1-E1-C7
gacccacacgtaaggtccaacaatctgtagccccagctcctgcaccttcctgtgtcagtgttccagtcaagtgctgtattgagtgctcatcttgctaccagcaagtatctcaacaagttcctcaacaagttcctcaacaagtgtctcaacaagcacctcaaacacaacaagtctcatctcagtctgcttattaagtgaagttgtagggtcaaggtgcccaacaattcagaataaacttgtgttttggctaacaaaaaaggaatcaatcaaaaaaaattcaaaataaaaagccactgggaaaaagaataaattggtgttttgagcaataaaatgaaagca

SEQ ID NO: 4742 - DNA, 301 bp, Cyanidium caldarium
  Clone ID: LIB190-047-Q1-E1-D5
ggtacaggtaacgaattcccgggctcgacccacgcgtaagcccacgcgtccgcgatattagtctcgacttttctggagctccagagtggagagtgtcaaggagctgaacaaaattatcacaggctttcttgtgcataactatgatcgcgtcgtttttcaaacgagcgatagtgactggcaagtccgtgaagttcgtatcttcattgctctgcagcgaaaaagaatgcttcgagttctactttgtatgtatcaacaactctttgatttggttgatgacaaaagctctcccctcggaatgggt

SEQ ID NO: 4743 - DNA, 197 bp, Cyanidium caldarium
  Clone ID: LIB190-047-Q1-E1-D7
cgacccacacgtaagcccacgcgtccgcggacgcgtgggaaaaaaaacaaaaaaaaaataaaataaaaaaaatcaaaaaaaagaaaataaacaaagaaaagaaaatagggcggcctcccaaaaggatccaaccttacatacatgtgcatgcgacttcataactcttctatattctcacctaaattcaattgactagt

SEQ ID NO: 4744 - DNA, 408 bp, Cyanidium caldarium
  Clone ID: LIB190-047-Q1-E1-D8
aattcccggctcgacccacgcgtacgtctgtcttcaagtttatgtacgcaaactatgacaaccaaggaaattgcataccttgaaaagagatgcgaagatctttggattttttctggagagtcctaaactggactcagtgaaagctgccactgttcagcagaggcttgtgaacaaacaactctggccgtctacagaaattttggactgtatttgcagttattcaacaagcaacagactacgagtttgtcgttcttgtggcacgaaaaagcttcacgttacaatcacgtattcatcgtgagcacagaaactaactaacgcagttgagaatgtcttatttttgggctacagtagaagccggcttcggaccgagcttcgaagagcaagactgtgattacaatcaaaggaaca

SEQ ID NO: 4745 - DNA, 413 bp, Cyanidium caldarium
  unsure at all n locations
  Clone ID: LIB190-047-Q1-E1-E4
acgcgtcagggataatttgggtattcaagcgtcgtcaacctgtgaactggtattccaagatgcaaaagtttcaaaagaagatgtgttangagaaattggcaccggttataaaattgccatagaatccctgaacgaaggtagaattggaatangagctcaaatgattggacttgcccaaggtgcaatggatattatatttccatatctacatgagaggaaacagtttggctcccgtatcggtgattttcaaggagtccagtttcagtatgcacaagctcgagttgaattagaagcagcgcgagcgcttgtttacaacgctgctcgtatgaatgatgcaggtatatctattccgaaagaagcagcctttcgcaaatactacagtgcccaagttgccgaaagaattgcttccaaat

SEQ ID NO: 4746 - DNA, 356 bp, Cyanidium caldarium
  Clone ID: LIB190-047-Q1-E1-E7
aattcccgtctcgacccacacgtcaggaaagcgaaagagctgcacaacttcagcgtaagaaggagaagcaacaagctgaagaagcacaaatcaacgaggatccttcggttgttcttcagggattacaaccaactcagcaaactccgatgcttggatatggaggaagaccttttggaaatggaccttctggatatccacaaactggccttttaagtttgcctcctgcaccaggtacctttcagtgaacgttgttagtattcatcctgttgttggaaagacgatgggaaaaggtttttgttgaataaactagttgttttgtttgtgaaaaaaagaaagaatgaaaggaagttatggca

SEQ ID NO: 4747 - DNA, 404 bp, Cyanidium caldarium
  Clone ID: LIB190-047-Q1-E1-E9
acccacgcgtcagcccacgcgtccggatacaaacaagttatcaagagttgcaaaaagtacaaaaaggtacgtggacatggtgatgatgctgatggttgttatgtgggtaatttcttagaaataggaaaactgttcaacaacaaacaaatattaactgcccagttgagagaaaacgaactagtgaaaacggaagttgatttgttggacgagtcatcgacgatatacaagttggtgggtcctgtgatggtaacccaagtaagtatgcatccatcgataactacaaagacttgtgagtgtgtgagtgtgtttaggattatgcagaagtgaaaaatacggtggccagtcgcatcgattacctgaaaacagagctggaaaaagtggataggaaattggaaagtttggaa

SEQ ID NO: 4748 - DNA, 423 bp, Cyanidium caldarium
  Clone ID: LIB190-047-Q1-E1-F10
gacccacgcgtcaggtttcttcaatggtcccgggttgggtcccgttccttgggtgattgtaccggaaatctatccctggtacgttcgttcgcaatgtctcacgttgaactcgtttgcatgctacatgctgaatttcgtcgtttctttttcgtggccaacgatgctcaagtcgatgcatgcacaaggcgcgtatagtttttttgcaggctttacgttgttatccacttgctttatctatttgtttgttcctgaaaccaaaggcgtggaaatggaagccattcaagaattgtttcaatatccattgtatactattgcaaagaagaatgtgagtgaaaccaaagcgtatatgagcaaggtttcttggtttcgtcgatgggttggaggtaatggcggtgagcaagagaagacatttgaaaaagacag

SEQ ID NO: 4749 - DNA, 434 bp, Cyanidium caldarium
  Clone ID: LIB190-047-Q1-E1-F11
cccgggccgacccacgcgtcagcccacgcttccgctttgaaaggaggtagtattcttggtagttcgaaagaagttcctcgagcggaatctatagtagatgccatatcggataatggtttcaatcaagtttatattattggagggggtcctatcgacggaacgctgaaagcttcgcaacaaatattcgaagagataaaaagaaggaagatgaaatgcagtttagcagtaataccaaaaacgatagataatgacataatgcgaattcagcgatcctttggtttcgagacttccattgaagcagcagcacagtccttacgtagtatacattgtgaggcttcatgttcttaccatgctgtggcagtgatacaagtacctggaagaaatagcggcttttttgcagtggagacagctttggcttctcgtttagtcgatgc

SEQ ID NO: 4750 - DNA, 201 bp, Cyanidium caldarium
  Clone ID: LIB190-047-Q1-E1-F12
ccaacgcgtccggaaatttgcgccccccgaagttttgaggtgtaattggaaattttggtatttaaccgcaatagtagtaaacgaattttggaaaatggtgcgaataaacactgtcaacttgttgtaacaagatgaaaaaaaaaaaaaaaaaaaaaaaaaaaaaaaaaaaaaaaaaaaaaaaaaaaaaaaaaaaaaaaaaca

SEQ ID NO: 4751 - DNA, 396 bp, Cyanidium caldarium
  Clone ID: LIB190-047-Q1-E1-F8
aattcccggctcgacccacgcgtacgcggacgcgtgggtttactttgtacttgattcttgtaaaacatgtctgacgatattgttgccttggttattgacaatggctcgggtatggtgaaagcaggagttgcaggggacgatgctcctcgttccgtcttcccttccatcgtaggtcgaccaagacaccaagctattatggttggtatgggacaaaaggaaagttatgtgggtgatgaggctcagtctcgaaggggtatactctctttaaaatacccaatagaacacggtattgtcactaattgggatgatatggaaaagatatggcaccatactttctacaatgaacttcgaattgcacctgaagagcatccagtcctgttgaccgaagctcctctc

SEQ ID NO: 4752 - DNA, 422 bp, Cyanidium caldarium
  Clone ID: LIB190-047-Q1-E1-G12
cccacgcgtcagggtcaattgtgtatcaagaagccttggccaggtattttccgaacgatattgcataatcatgaaagatatgagaaggcttattttgccaagtttcccgggtattatgtatccggtgatggatgtcgtagagatgccgacggtctttattttgtaactggacgtttagatgatgtgatcaatgtaagtggacatcgcattggaacagcagaagtagagtctgcgttgattggaaatcgttcggcggcagaagcagcggttgttcctattcctcacgaattgaaaggtcaaggaattgttgcatttgtgattctgaaacaaggaatcccggcaactgctgaactggaagaagaaatgaaaaagacagttcgagtaaatatcggacctattgcagttcctgaacgagtatattt

SEQ ID NO: 4753 - DNA, 321 bp, Cyanidium caldarium
  Clone ID: LIB190-047-Q1-E1-G5
cccggctcgacccacacgtcagcaacgacaaagccgtagaagctgcagataggtagtgtttgtttcttatccactcgtactgcagtttttgacacttggctagtcgtaaattcgggcctctgtcgtttgaccttattcacggaagagttctttattctattcggtcacctaccaactttactcgtattgtaaatagtaagaatgcgatgcgtcgtgatcatattattcttgccgtagagcagtctttgttaggagagttgtgacgtgcagttggatgcaatggtttgtcttttttaaataaagtatgtatttgttccaaaa

SEQ ID NO: 4754 - DNA, 429 bp, Cyanidium caldarium
  Clone ID: LIB190-047-Q1-E1-G6
aattcccggctcgacccaagcgtacggagacgtttaaaaaaaaaaaaaaaaaaaaaaaaaaaaaaaaaaaaaaaaagaaagaaaaacaaaaagaagggcggccgatctacacgttcaagccatatctaagctcgtatacaatgtcatatatcttcaattcagtcaccgacgttcaattcactggccatcgttaaacaacttccttactggaaaatacctgccttgacccaaattaaccgccctgcagcagatctccctttcaccaggtggggtactatcgaacatgccaacacttatccaccttcacaacagtttcgcaccctcaatgtcgaatgggattcaccctgtagcgtctcattaatccccgcagctttactggttaacctcagagtgacctatacacttgccatttccctatcgtccgttcct

SEQ ID NO: 4755 - DNA, 312 bp, Cyanidium caldarium
  Clone ID: LIB190-047-Q1-E1-G8
aattcccggctcgacccacgcgtacgagtttctaagaattggtgcctttgtgtttggtgtagctgcaggttttggaagtgcttcagcggaccatcgtaaaagagaaaaaattttaatttctaaaattcacgagcgcaatgccaaaattgaggcgttggaaagtgaactaaagcaactgaaaggggaaattccagcttctacaggtgatccagttcaagattggttgaatcaattggaataagatgtatatgttacaagtaccttgtggaagagagagatagtcatttgaataaaattagttcttttcccaac

SEQ ID NO: 4756 - DNA, 436 bp, Cyanidium caldarium
  Clone ID: LIB190-047-Q1-E1-G9
ccggtcaagaaatcccgggccgacccacgcgtcaggactttgtgagactgtggagatgatgacaaacattttacagacgaaaatttcagagaacaaaaatatgaaaacacaattggaagagaaggatgctatgttatacaacttacagatggagacgaaaatgaaggatgttcacaaagaacagaataacaaggacgccagtaacagtttcttggctattcatggtgactcacccgttttgaacagacttcgcaagaaaatagcggataatcaagaaacttcgggcttccagaagaagaactgggtgtaaaggtcgagtagtagagtaagtgtaaaagggaaaggaaaggagagaaagaggaaagggatgaaatgcagagatctctagagaaaggcaagaaagaaaagaaaggaagacacagtaaatgaggcgaga

SEQ ID NO: 4757 - DNA, 380 bp, Cyanidium caldarium
  unsure at all n locations
  Clone ID: LIB190-047-Q1-E1-H1
cccacgcgtcagcccacgcgtccgattgggcaatgtacagggaagtatgacccagtaatgaggagtggagtaaacagaaaaggaagtaaaaggagggaatgaagggaagttatggcaaaaacacgtgccagcagcagcggtaaaacgtgtgtagcaagcgtagagcagaagaactgggtgtaaaggtcgagtagtagagtaagtgtaaaagggaaaggaaaggagagaaagaggaaagggatgaaatgcagagatctctagagaaaggcaagaaagaaaagaaaggaagacacagtaaatgaggcgagaaagcatangaagtgaaacggattaagaacccgtgtagtctatgcagtaaaagaaagaatgagtaacaaaaa

SEQ ID NO: 4758 - DNA, 407 bp, Cyanidium caldarium
  Clone ID: LIB190-047-Q1-E1-H11
gaccacgcgtcagcaatctctttcccatgcacaacagttgcgactcgagttgaacgagttttgtcgaggaatatcttttcttttccatgaaaagatggaaaatgcgatttcctatgatccattaggaacatcctcttcttctcctcgacctcatgccaccaccacattaatgctatatcctcagcaagtcaatggtctatatcaacaatccgtatcattgtgtgagaccatcgacgacaaagaacccgagtcgcaatgccgtacatttcaaacgagtctggtggcaaacaatttttttggcaacatcatattgtccacttgtctcatcggggcaacctctggcaattcgtttggaagcaacttgaatatcccaccttataacagtaccaagggaatagatggctatc

SEQ ID NO: 4759 - DNA, 424 bp, Cyanidium caldarium
  Clone ID: LIB190-047-Q1-E1-H6
tcccggctcgacccaagcgtacggaaacgctgaggattgttgtgggtgacttgtggtagcagcagagctcttggtcaaatcctatcctttaggtttcgttcaaacatatgtcgatgaattgctttgtgaatagcagatttgtgagcctttacaaagtttctcactttggctgtcacaagagctttattcaagtctttcctcgtagtgttcgtctactgcgccatcaacaaccggttcagctgttttgctgtcaaaaaggtttccaaagcgtatccagtcagtactttttcaatagaagagaactgttcaaagctttattggttgcttctgttgcgccctttgtgtctgtttttcctgcaaaagcaagccacaactttaagcttactggacagtatgaacaagacgtccgtaatatgatagaaag

SEQ ID NO: 4760 - DNA, 417 bp, Cyanidium caldarium
  Clone ID: LIB190-047-Q1-E1-H9
agggtagggtaagagatgaaagaccactgcatgaggataaggaatctaactgagtaaggatccaaaggtagcgaagtaaatagacgtttgaaaggcgtccagtatgaaaggagaaacgagtgtagcactgtctagtcgtccaactcagcgaaacagcaataactgtgaaaatgcagtaaactagcagtaggacggaaagaccccataattcttgactagataggtttagggaggagagagaatcataatagaaatccgaaaggagtagaagaaaagagagagaagaaagaaaagaagagaaaagccgtactgaagaccgacacaggtactcgaggagaaaggagacccaaattaacgtgagagaatggacgataaggaactacgcaaaatgatatggtatctgcggtagaacatatg

SEQ ID NO: 4761 - DNA, 454 bp, Cyanidium caldarium
  Clone ID: LIB190-048-Q1-E1-A4
attcacgggtcgacgcacgcgtccaattttcatcgagtattatattccatgccgattggagactccatttatgatgagcctggatcacatttggtagaaaatattatgaaagaagccaaagaaagaaatgtaaagatacattttccagtagattttgtagtagccgatcgcatggctcccgatgcacatacagagatacgtaccagagaacaaggtattcctgagcatatgcaaggactggattgtggaccacaaagtattcaacaatttattcaagtagtgcaacattgtaatacaatagtgtggaatggacctttgggtgtgtttgaaatggatatatttgctcaaggaactcgtcaagtaatggaagcacttgccaatgccaataatattagtactattggaggtggagatacagcaactgctgctgccaagtttggactgggagaaaaga

SEQ ID NO: 4762 - DNA, 430 bp, Cyanidium caldarium
  Clone ID: LIB190-048-Q1-E1-A5
gggtcgactcacgcgtccatggctcattctttgttttgttgtgtccaagtgagtgtggggtttggcattggacactatatggcaagaagcgacgacgaatacgactatttgttcaaaattgttcttattggagattccggggtcggcaagtcaaaccttctctcgcggtttactcgcaacgagtttaacctcgagtccaagtccacgattggggtagaatttgcgacgaaaagtgtccaaaccgaagggaagacaataaaagcacaaatatgggacactgctggtcaagaacggtaccgtgctatcacctctgcgtattatcgaggtgccgttggagcacttctcgtatacgatatctcgaagaaggaatcctttattggtgtagaaaaatggctaaaagagcttcgtgatcacgcggatagtaatatag

SEQ ID NO: 4763 - DNA, 237 bp, Cyanidium caldarium
  Clone ID: LIB190-048-Q1-E1-A6
ccgggtcgactcacacgtccgaagaagattcctccaacatgtgcaatgagtgtccctgttgcacgcgagactgcattcaccatgggtgacaacgagtccaaaacaaacaagtcagagtcatattccacctaaatttacaatgtccttaggcaaatgcattcggcataccgccatgatccaccaacgcgattagcatccagaacaccctggagacctacacatttgcacgtactgcca

SEQ ID NO: 4764 - DNA, 384 bp, Cyanidium caldarium
  Clone ID: LIB190-048-Q1-E1-A8
ccgggtcgacccacgacgtccgaccatgcgtcggggtttagattggcgagttcaagatcctaatccacattcctagtttaagtttctgagagatgtcgtagaggaaccttttgcccatcgtcattttgaaaacggttctaaaatagttacacaacaggagattcatcattgcactttacttgttgaaatttgcttggaccattgttcgatacattatgaacagctacgttttacgcgtttaactagaatgctatcttgcaatcgttgtgcgcattgtgttctataccatcatctttgtcgatatagagatatggatggattccttcataagttgaatcatcaattggacatcattacagatgacttgcgagaatgtatgaacaa

SEQ ID NO: 4765 - DNA, 411 bp, Cyanidium caldarium
  Clone ID: LIB190-048-Q1-E1-B11
ggtcgacggacgcgtccgaccacgagtccgcggacgcgtgggcgatgattcgatgcggcacaagacagttgtggtggcaactgcgcgctcgttatcatacaactactactgtccatagagtagcagcagacgaagaaaaggaatctgtcggtataaagcctaaacgtttgcatcagcctcttggagtttatccacaaggaaccaatctggaagaagtgagagaaaagtggcaaagtgacgctatggaacttatctcgaaagtacctccgatagtagtcgatggctatgtcatagcgtgtaatggaggccgcggtccattaggacatccaatagaatatattcgtttggaagcaccttatccttcaacttgcaaatattgtggtttgcgatatatcaacaaagacacttttg

SEQ ID NO: 4766 - DNA, 426 bp, Cyanidium caldarium
  unsure at all n locations
  Clone ID: LIB190-048-Q1-E1-B12
acgcacgcgtccggtcttcagtggtgagcggatatgtctctgacagacatcctgtattgggtggacccagtagtttggagcaaacgctttgaccttccactatctgttacttgcttctttatatatttcatagtatttcatatagcttgtgccttctttggtattgctgactattggaagcttctgcgcaagtacaagctgcacgaaagtgacgagaagacctacctgcagttgctgccaagagttgtgttcaatcaactggcgttttacttgactagttgctacataggagagaaaatgggttggatattcagaaccccttctaaagacaatgctttccaactctggaagttgcctatctatcttactttgtactctttctatcatganattatattttactctgctcatcgttggctgttgcac

SEQ ID NO: 4767 - DNA, 346 bp, Cyanidium caldarium
  unsure at all n locations
  Clone ID: LIB190-048-Q1-E1-B2
gtcaagaatttacgggtcgacgcacgcgtccaatcagcaattggaagaaactatcaactttaaaaaacgtaaacttacaaaacctgcaggaataacaaaacaaacaagtttacatgtatgggtgcaaatagagaacaagttggcagaccgtaaagagctgttaccagtcgctcagttcttatgtcaacgggactgctctctgtcaccccttatcgcagaatacggattacctcagtttgaaagacagtccgttttcccgagtcttatgaaggccatcgtttcgcagcaattgagtgggaaggcagcgaaagctatcatgcanagactacaagtgctgctgcaagat

SEQ ID NO: 4768 - DNA, 304 bp, Cyanidium caldarium
  Clone ID: LIB190-048-Q1-E1-B5
cccgggtcgacccacacgtccaatcaaccgccagtattgacaaccctatcacagtacagctcatcctgaggaatctcagtgcctgactgatttcggcgtacggcaatgttactgttgacttgtctcggtacagtaccttgaaagatagttctgcactgaaccttcgctacaggaacgttaagttagcctgtttcatggatacatgtcttagttttacgacacttatcctttgtcaatactggtaatcatgtattctgtaggcgctcggacttgaatgaaatcgaaacattggagtcgtgctttt

SEQ ID NO: 4769 - DNA, 267 bp, Cyanidium caldarium
  Clone ID: LIB190-048-Q1-E1-B6
cccacacgtccaaacaagcgccagtattgacatccctgtgacggtacgtataattccggcgcgtctcagtgcctgtctggattcggctttcggcaatgttactggtaacttgtcggggtactgtaccttgaaggacagatttgcactgatccttcgcgacaggaacgttaagctggcgtgtttcatggatgacatgtttttagttttatgacacttatccctagttacttcagtcgaacgtgtattctgtaggcgctcggacttgct

SEQ ID NO: 4770 - DNA, 432 bp, Cyanidium caldarium
  Clone ID: LIB190-048-Q1-E1-B8
acccacacgtccaatggaatttggtttccttttggacatttagaacgcgcctttcgtaccgattggccgatacaaggtcatccctatacttatggatatcctagtttgagatatgcaagtcaatgttccagtggaacttttcgtcaacagtttgcaaggcataagttgggagggctacatatatccaattattgcttccctccctttgttatcttaaaggaactaacaggaacggaatatggaaacgaaactcttcaaaatatgacaaaggaacagtgtcaacaacttgtccacgactgccaaggccactcttttggaagaactgttcctttagaccaagtcccagaagaagacttggatgcagtgtatattccttggtttgtcaagtgtaaccctaaaagatatccatcgttgatgcatcaagtggatctt

SEQ ID NO: 4771 - DNA, 382 bp, Cyanidium caldarium
  Clone ID: LIB190-048-Q1-E1-C10
gtgtttgggcggtggaaaacagagacagacgatggaggaagaagatacgagttggagcacaatttataggcaatgtatagatacattgttttctcgttggacggcacttggtttggctctggaccattggaataggccagcagaggagtgtcgacaactggtagacgcgcttcaacaagccatcctacaagcagctcaagacaaccaactttgtacagatttcttggagactttatttgaagaaacttttgatattcttcaagtggatatagaggatggaagcatagaagaggttgcttctttgctatgtactatgtttcaagactgtctccaacgcaacacggaatcgttgaccaggtctccgaagcctagatcgacaata

SEQ ID NO: 4772 - DNA, 446 bp, Cyanidium caldarium
  unsure at all n locations
  Clone ID: LIB190-048-Q1-E1-C2
gtcaagaattcacgggtcgacgcacgcgtccgaccacgcgtccgcccacgcgtccgcaaacctcaagtggatcatcccacgttggtaaagatagacttgtctcaaggcagctttaaagtactccaagactgtgacagagatttagaatgtgatcataataccaagtttcagttggaacttattcagtatggtctcttttcacctggtttttggacgagagaaaatgttctgctcttctatttggagctcgtgtcaggtgtattcataagggacactctctaccttttctacaacanaggtgaaaaacatttgtttgcgatttaaatgctgtttttggagacacaagttccactgtatgcagacataaaaccaaactggaagaaccaacactttaccgttggcctcaccgtcaggtctttgtgtaaggaatatcaacgacagtattc

SEQ ID NO: 4773 - DNA, 422 bp, Cyanidium caldarium
  Clone ID: LIB190-048-Q1-E1-C4
ggtcgacgcacgcgtccgaaatatagaagagcagcttcaaagtatccttgaggagaaacctcctgtcgttacttttacgtttggattgttaccttcagattggttggaaaggtttcactcaaacgacatgctcgtgggtggcacgtgtaccacagttgaagaagcgaagcaactcgagtcgttaggcgttgactttatttcagttcagggagcagaagctggtggacaccgaggaagttttatttttcatccaccgcattcaacagccaaacgttgttcttctatcccgctcgaaacctgtttgttggactgcttatctgcagtaaaactgcctttgataccagcaggaggtataacaattggaaaacaaattcggtcaatttaaaataaaggcccaattggtgtacaactaggcacggtat

SEQ ID NO: 4774 - DNA, 407 bp, Cyanidium caldarium
  Clone ID: LIB190-048-Q1-E1-C6
ccgggtcgacccaaacgtccagaggattcgaggagagagacagacagatggccaacgctggtcaagatggccttgtgcaagtcaacaaacatagaaaagtaaagagattgcaagaagataatattttgaatagagcactatcacaaccaggagatgtatttctgtgcttttgcaacatccagttgttggtgaatgcagaaagagctattataggaaatattacttgtccagaaagtatcgaattgtgtcgtctattagctggacatatagcggtttggttcgatgaacatttggatgactttcgtttggaagctatcttgggagcactattgtgtacttgttattgtgagtggaagcgttttgaaggagaattgggggtacaagaatggaatgaattggagaagata

SEQ ID NO: 4775 - DNA, 229 bp, Cyanidium caldarium
  Clone ID: LIB190-048-Q1-E1-D1
gcgtccgagggttactcagcaagaatgccagtacgtccaagagtcgtattgtgtcgagtatgaagaatgtcagcaagttacccaggaagtttctccttcagaaattgtctactacggtgaatcttcttctagcagtagttactactactagaacacttgtgaaatgcgcaaagtcgcaaagtagagtgttcctttttgaataaactgttactttttgtcaaaaaccaac

SEQ ID NO: 4776 - DNA, 350 bp, Cyanidium caldarium
  unsure at all n locations
  Clone ID: LIB190-048-Q1-E1-D3
ggtcgacgcacgcgtccgaccacgagtccgcccacgcgtccgcccacgcgtccgggtttgactaccgaacgatattccattgtacatgactgaaagtacagtanaaagttgatatgaaaactgttgcttcccttcanacgattacctttagtgtcattgtctctcaatgggaacacattccccgacagtgtatacagagacttccgaaagaactcttgactatgctggtagaaaggttcacaagggagaagaaactgtcctttggggttctcaagtggttggagggaagtgagtttcagtttctcaatttgagcggtcaaggtggaaaagtgaacgatgaatggatgact

SEQ ID NO: 4777 - DNA, 357 bp, Cyanidium caldarium
  Clone ID: LIB190-048-Q1-E1-D5
gacccacacgtccacccacgcgtccgggttggaatgtttgaaaagcttgttcgactcaactatggtggatattggttgaagaatatcggaattagtccatattggaactttcacttggttccacaactaaggcttgcagatggaatcaatgtgccagtattgccaaacttgcaagacctgctgcctacagttctgaaaatggctggacactccaaatggcacaatttcacgcgtaagtacatcttgttcctatgacagtgtgagagtataaaggtcctgttttagaccagacggcacgttcagattcgaagcgttcacataatatttcaaagatatctagaagtattagatctgcag

SEQ ID NO: 4778 - DNA, 392 bp, Cyanidium caldarium
  Clone ID: LIB190-048-Q1-E1-E1
attcacgggtcgaccgcacgcgtccgattgtgaggtggaacaggaagtggtagtggaatatgtgatcctaaacgttccaacgtggttgaataaaaaggacttgacgaaagctttggttaaagcatgcgtgaagtttgagtcagtgaaaaagttgcacggatggaactacagttttatttcgtttcgctcagagcaagatgcaagtgaagcgaaagttcttttggaatctcagaaaatcaaaggttttcactgtgttttggaacaatggcgcaatgttaacaagaaaaggaaacacaaggagtgtttacaaatagttgacgatagaatgaaacaagtcaagtgttcttccacgagttaagaatttggaaaaagattgaaaaagactgttgctg

SEQ ID NO: 4779 - DNA, 201 bp, Cyanidium caldarium
  unsure at all n locations
  Clone ID: LIB190-048-Q1-E1-E4
gcgtccaaaagaaatccgaaaaagaagagaaaaaggtaagaaagaggaccgaatcagggtaagaggtanaggagcaagaagagaagagagaatgctgggtggagtagcgaaacaagagaagggaagtaaaaggtaagaaagaggaaaggtttacgagagaaggaagtagaaagaagagagtgtaaggcggcgtcataatag

SEQ ID NO: 4780 - DNA, 221 bp, Cyanidium caldarium
  Clone ID: LIB190-048-Q1-E1-E9
gagaagagagaatgctgggtggagtagcgaaacatgagaatggaagtacaaggtaagaaagaggaaacgtttacgagagaacgaagtacaaagaagagagtgtaatgcggcgtcataatataaatccgaaaggagtagaagacagcattgtggaccactacccaaacatcgacggaattctcatacagcacgcgtgctctcatgccacctttaaagggaac

SEQ ID NO: 4781 - DNA, 366 bp, Cyanidium caldarium
  Clone ID: LIB190-048-Q1-E1-F1
aattcgcgggtcgacgcacgcgtccgaccacgagtccgagaggaccctacttgcaagcacacgctcgtggacacgaacatggtttctacaatgactgaagaacaacaagcgggtcaatcaacggtgcgtgctcgaaacaacgattctgttgacgaagagttgggtttgaaggaccttcctcccaattcttttgtgaggcgctactcgtatggaaacatgggaggaatgtcacaggaataccacccacctgccaagcaagtgatgaacttgggacatcccgaagcactgggattggctgggtttgcttcaacagactttatgttgagttgtatcaacgcaaatttgttacccagcagcatgacaaat

SEQ ID NO: 4782 - DNA, 427 bp, Cyanidium caldarium
  unsure at all n locations
  Clone ID: LIB190-048-Q1-E1-F11
ggtcgacgcacgcgtccaattccaaaataaggacgatcgcctacggttcgacgtaacacatgacagtagttgagttctaaacgacccaactgagtatcagcaaccaaacccaaacctacagatattcgtgttgtttcaaacaaattcttccaaggagcttttcttgtaaacacttggccaagtacagattgagactccttcacagacgaaatatctccaattgtagcaaaaatatgagctctaggttgaaataaattacctaatactccttttactcccagtggaatactaagagaactgaagatggtatagaacaattctcctcccaagggatcttctttctcccatggccctactcctcgagtttgaaaacctcgaaaactattaggaccacctaaataaaaacgatccanaacagttgaagaat

SEQ ID NO: 4783 - DNA, 408 bp, Cyanidium caldarium
  Clone ID: LIB190-048-Q1-E1-F5
acccacacgtccagatatccatgctgatacgggatcccagtacgtgacgacttacgatcagtaacgatagattatcatgatgaatatagggagtaaattaagaattagatatcgatgtaattcatagaggcactagagtgagttcatttcttgcatgaatgcatctggtgatgaacctgtgtagctcatttcacataccctctatcattactcactgtcggactatgcgactgataagggtatgaagtccactaatggtactcttcgctaaagtgacttttactacatagtcttttcaagaataacttcatagcgctctgacttttggtaagacatttctgtaaccttagtactctctaccatttccaccgactccgataaggttatttcagtgttgaaccccttttt

SEQ ID NO: 4784 - DNA, 410 bp, Cyanidium caldarium
  Clone ID: LIB190-048-Q1-E1-F6
ccgggtcgacccaaacgtccagacaaggacgaggatgtggagtatcctaggaacaagtattcaactgggaaaacaagtaactttcaagtttgcgccatcaagacattcatatttcactttatggcgtcgtttcgcgcaaactgccaacaacaataacttgtccacagatctacctccgcacgtcctgatcaagatgcccgctctttctcctactatgaaaacaggaaatattgtggagtggaaaaagaaaaattgagaatctgttacaaccggttgactaatttcggaaattgaaacagacaagggaactatggagtttgaatctcaggaaaaaagttatttagcaaaaatattagtgccatcacgaacacacgaacttcctgttggaaagttagttggcattttagctg

SEQ ID NO: 4785 - DNA, 354 bp, Cyanidium caldarium
  unsure at all n locations
  Clone ID: LIB190-048-Q1-E1-F8
ataagtaggaaagagcagcagcatttatttcatattttcattgtgcattgtggaagaaaatggctccaaaaggtgcaaagagtgttcctgttgcaggcaagaaacccatcaccaaaagtgataaaaagtccaaaaagaagaggtcagagtcctatgctatctacatttacaaggtcttgaagcaagtgcatccggatactggtatatcctccaaggcgatgagcatcaagaactcctttggtaaacaatatatttgaacgtattgccagtgaagctagtanacttgcagcttaatccangacgaagactttgacttctcgtgaaatacagactgctgtacgtctgttgctccct

SEQ ID NO: 4786 - DNA, 333 bp, Cyanidium caldarium
  unsure at all n locations
  Clone ID: LIB190-048-Q1-E1-G11
gcgtccgactcaaggaagaatggcttccgaggaatccaacccgattggaagtcactcagcttgacttggagttgattgaaaggatagagaaaaacaacaagacaaagacagaaaagccactaggtaaacgttacttgcgaagtggtgtcgcgcgggaggatacaagtagactaacgacagcacaacgcatcggcttggaggaaccacaccagtgaagcccaggggacgagcttctgtacagattcggttttattttttcattgtgaagtaaaccttgaaagaatggttggtgcattgaaaagacataaagcgacgtttatgatananaanaan

SEQ ID NO: 4787 - DNA, 300 bp, Cyanidium caldarium
  Clone ID: LIB190-048-Q1-E1-G2
cgtccgcccacgagtccgaagggctctgttggtatttcgcaacattatatgagtgtcattgactattatttggaaatcgttttttctattttgattccattggcacttattcgtaccaatgcatattttgatctattactaatgggtgaagatgctattctgggctcgtatgatgacagcggatacgactttttcttaggaaatcttaagagatattcacctgtaagtagtacagaagatattcaatttgcagctatttatcctattttctactataggcttaccattcgatgcatcatc

SEQ ID NO: 4788 - DNA, 381 bp, Cyanidium caldarium
  Clone ID: LIB190-048-Q1-E1-G3
ggtcgacgacgcgtccgaaagttaatggagaaggaactcaccttcgaataccattcttcgacgttcccatcatttatgatgttagagcaaagccaagaagcgtgcagtctcttacgggaagtcgagatttacaaatggtgcaaattacacttcgagtactttcaagaccggacccagataaaatacccgttatttatcaaacgttgggaatcgattatgacgagagagttcttcctagtatcgtcaacgaagttttaaagtctgtagttgcgcaattcaacgcttctcagttaattacacaacgggaacaagtatcgcgtctgatttcaagaaacttgagagaaagagcgaaagacttttaatatgtattggatgatgtgt

SEQ ID NO: 4789 - DNA, 408 bp, Cyanidium caldarium
  Clone ID: LIB190-048-Q1-E1-G5
cccgggtcgacccacacgtccagtgcaaagagtgttcctgttgcaggcaagaaaccaatcaccaaaagtgataaaaagtccaaaaagaagaggtcagagtcctatgctatctacatttacaaggtcttgaagcaagtgcatccggatactggcatatcctccaaggcgatgagcatcatgaactcctttgtgaacgatatatttgaacgtattgccagtgaagctagtaaacttgcagcttattccaagacgaagactttgacttctcgtgaaatacagactgctgtacgtctgttgctccctggagaactcgccaagcatgcagtttcggaaggtacgaaagcagtaacaaagtacacttcttcgtaatacgtactttgaacatatggtgtttgtcaacaccttttt

SEQ ID NO: 4790 - DNA, 347 bp, Cyanidium caldarium
  Clone ID: LIB190-048-Q1-E1-G8
ccgggtcgacccaagcgtccaggtgacgggtcaccgctcttttcgatcctaggaataccactaagactcacaagcagcactttggtattactgttactttactgaaacaagtaccagtgatatcagatggagtagttcctttggatatcttcctaactgctccacatgaagttttacgtgtggttcattcccatggttcaagcttcctcatggtagagaactatagtgctggaatcatcgtgactgtgtagcgtggctctcaatctgttctagctagcatgttcccggatcgtgtcctacttgaaaattcgctagatgggttggctactgtcgcactgttatggttg

SEQ ID NO: 4791 - DNA, 373 bp, Cyanidium caldarium
  Clone ID: LIB190-048-Q1-E1-H1
attcacgggtcgaccgacgcgtccgaccacgagtccggcgtccagtatgaaaggagaaacgagtgtagcactgtctagtcgtccaactcagcgaaacagcaataactgtgaaaatgcagtaaactagcagtaggacggaaagaccccataattcttgactagataggtttagggaggagagagaatcatgaagtagaggaggtggggtaagagatgaaagaccactgcatgaggataaggaatctaactgagtaaggaaaataagcttaagctagtttggctggggaagtaaagcctaagaaagagtaaattaggcaagcaaaggcatgagagaagtataatagcagaagcatgcttgaagaaaaagaaagag

SEQ ID NO: 4792 - DNA, 433 bp, Cyanidium caldarium
  Clone ID: LIB190-048-Q1-E1-H11
ggtctagaattcacgggtcgacgcacgcgtccggctttaagtttgcaaagtaaaaataatagaacaagtttaaaaaggccaatttcgtcttctagtcaacttttgcgaatgactggagctacttcctctgcttccgatgacagtgttccagatatgggaaagagaatgttcttaaactatgtcttgcttggtggtgcttccattccaatcttatctatgttgggtggttatgcatactttttctatccaccctctcgtggtggttcgggtacaggtactgttgcgagagacgtgttcggacgagaaataaagaaaaaggaatttttggaaacgaggaaaccaggcacgcatgagttggtacaaggacctaaaggagatccctactatcttattgtgagtgaagatggacagttggactcttatggactcaatg

SEQ ID NO: 4793 - DNA, 332 bp, Cyanidium caldarium
  Clone ID: LIB190-048-Q1-E1-H3
attcacgggtcgaccgacgcgtccaagcaaaaaaaaggatcccgtcccaaagcacttggtttgttcatacacatgttgaaaaggttttaaaccatcacagcctaataccaataaaggcggtggtggaaacaaccaaagactttgttcatggtgccaaaacacaggttgtatctctgtgggaagtggacagaggtgtccttgatccaacatggtttcaaccaacattacttccagtctgttagggtctgtagatagatgaaaaacactgtgtgaaacaagtttcttctgaatgttgcctctatacaacaaaatagtggtaccctgacaaacca

SEQ ID NO: 4794 - DNA, 280 bp, Cyanidium caldarium
  Clone ID: LIB190-048-Q1-E1-H6
cccaagcgtccacggacgcgtgggctattgaaggtctatcttggatcaactttgcctttagcctattcctttgtggaagtgcaatagcagatggtttgttggttggttcaagaagtgcaggctcggggaaacaaagtagtggatatagtagtaatgcgtgagctgttgggtacttgtgactagattattgtttcatgttgtgcagaaaataattcgttgtctgtaaaacagattgtaatggtgcagtgtattaaaacatagcttcatagcagtttttaat

SEQ ID NO: 4795 - DNA, 345 bp, Cyanidium caldarium
  Clone ID: LIB190-049-Q1-E1-A2
gcgtccgaccacgagtccggggaaggataacgacacgaacatcggaagtattatggctgttgattcacatgtatgttcaacgacttcattttcgacaagggaatctggcagcaaatccctgttgaaggcaaagcacgctaagatgtcatcgctgtcatcaacatcaagaaaatcgcagttgttcgctcttgatgagacgtttgcgaagaattttcagtctggagattcctcgaactcaaatagtttgattgagattctcgcatttgcagcttctcaagctctataaacggcagactgacttagtttctacttgttgtcattgaaattttattactcgtaattttc

SEQ ID NO: 4796 - DNA, 363 bp, Cyanidium caldarium
  Clone ID: LIB190-049-Q1-E1-A4
aatttacgggtcgacgcacgcgtccagtcttgggccttgtgagccctggatatttgaacaagtagaagtttatatattggaatccatgaagtggcgatatcgcttattagtgtatttggaattttgcttagaacaagcacgtcgttttgggttacctttcatgcgagcgttgccattgatatatcatcgagacgtgatttgtcgtcagtttgatttggagtttttattcggtccttgcatattggtatcgcctgtaaccaatcccgaagatgaagtaactttttatattcctgatgattctgtcttttggtatgattggtggacgggagaaagatggagaggaggacaagttgtcactagaaa

SEQ ID NO: 4797 - DNA, 369 bp, Cyanidium caldarium
  Clone ID: LIB190-049-Q1-E1-A6
ggtctagaattcccgggccgacccacacgtccacccacgcgtccggctttggcatttctgctgcttgttggtggttcaccgtacttggaaaatcttcgggttgttggttggtcaaagcacatcctgttatgacatctcttcctattcctattcacagcaacaacagaaaggactcatcaccttccagttcacctggcaagagttgttccccgcgatgggaagttcgggcaataagaacacccacaggtcgaaggaaacacttttatgtggaccatgaaagaaaagcaacttattggaatatgccaaaggagcaaacagactcggatggcacttgtacagaagaaggtggtgcaacaaacttgacctttc

SEQ ID NO: 4798 - DNA, 346 bp, Cyanidium caldarium
  Clone ID: LIB190-049-Q1-E1-A7
gacccacgcgtccaatttgactggggtttatagaatatgacctttcgatattttctccatgcatgtacaacatgtgtacataaatataccaactttgtttgaaaacatctttatggaccagtaactgttggaatgcctctcccatcaaaagactacgacttggtccaagcaatgattgtgggagaaatattgtttccattagttgcttgggcttcagtatagttggtggaggtatcatgtctttttgtgtacaagtgcaaactttccacctaccttaccttgaaagggaacaacaatagggtttctttttgtacaagactcgaacaagttggaaatgtacgagcat

SEQ ID NO: 4799 - DNA, 435 bp, Cyanidium caldarium
  Clone ID: LIB190-049-Q1-E1-B10
ggtctagaattcccgggccgacccacgcgtccagtggattcatcttgtagcaccaagtggctgtttattgcaaccccactgttggaagttgcttgtactgatgggcagcgaattgaaatgattcctttgaagaaagatataaaggaattgtttttctcgactttaaagaagaactttgagtcgaacgaagcgtcatgggagtgcagtgtagttgaaaccgcagttgctgtttttatccagtattatgaacagtgcgtggaacagtactatctagcaggcaaagattatgagctacctggttattccaaagtaaaatagattcggagtatgattgaagatgttctacaaatagagaaggaacttggaaatatgcgtcagacccttgttggcgttcggagtcgtctttgtacctttgaagctgcatcacgcagcgaa

SEQ ID NO: 4800 - DNA, 425 bp, Cyanidium caldarium
  Clone ID: LIB190-049-Q1-E1-B11
aattcccgggccgacccacgcgtccagaaactttgaaagattccgtagctcgtcttgtttgttatttgttcacttcagagcttgacagagtttcttggctgtactccttgagagactgttttgtgatagtaaagcatggtgggagcacttcaggttgctctggactttattggacaactccctgttgttgaaaattttatcatcagagaaatctaagcaagatgctggagcagtagcacaaggaaaaagcaaaaagatgaaggcagtttcttcttcagttggctcagtacgacaaggcgagtttaattggatggaatttttgaagacatattgtaatctgacagagtctgaagcaaatgaatgtttgtatgctatgaagagattctcggagagtgagatggaagtaatcagtactagtatgctga

SEQ ID NO: 4801 - DNA, 116 bp, Cyanidium caldarium
  Clone ID: LIB190-049-Q1-E1-B2
acgcgtccaaaggaaatatgacccagtaatgaggagtggagtaaacagaaaaggaagtaaaaggagggaatgaagggaagttatggcaaaaacacgtgccagcagcagcggtaaaa

SEQ ID NO: 4802 - DNA, 366 bp, Cyanidium caldarium
  Clone ID: LIB190-049-Q1-E1-B3
ggtctagaattcacgggtcgacgcacgcgtccaaccttatgccaaagatcgttggggtgcaactcctattgatgatgcgtgggaaaatgggcatataaaagtagttgaaattcttgaatcctttctagagcgtgagggagactccgaatctggaatgactgaggaatggggacaaagaagaaatcagtatcggtcggataaaggatatgacattccgttgaatactggacatcgtcctttaggcgcctttccaagtttctctttgacaaatgatgttgcttgtaacgctcttcgtcgtgtagtgtcgagtccagtgaaagaagaaaccgatgctggattacagcaaatagacagaagtgcatcatg

SEQ ID NO: 4803 - DNA, 294 bp, Cyanidium caldarium
  Clone ID: LIB190-049-Q1-E1-B4
ggtcgacgcacgcgtccagaaagtggcacaacggtaatgggaaaggaaacagtagtaaagaaaagcaagcgtgtattggtcaaactgttgagtcgggctggtacacgatatttttataccaaaagtaagaataccagaaatactagtggcaagttggagctcataaaatacgatcccattgtcggaaagcacgtattgttcaccgaaaccaagttgaagtaacttggacagctgtcgatagaacgcctataagattgacgttggcaacttacataaacagcgctttactgaaaa

SEQ ID NO: 4804 - DNA, 357 bp, Cyanidium caldarium
  Clone ID: LIB190-049-Q1-E1-B5
gggccgacccaagcgtccacggacgcgtggggtttcgatgaactacagtccctattcgataactaccgacaaatcagaaggacatattgttcccggtactttttcaagatttgagtttcttgaaggtcgagtcaccggtccaacgtgagtatttctttttactgctcgatacagtctttcacgtctttgtagcgtcttgaaccctagcatacttgactttacagtgtctaatgtttcagatgctgcctttggagaatggagagcattatcggcttcaagtagagcaaaagaactggaacacagaagaaacgtcaccaaagcgacaatagaaagtctcaagaagactcctaccgaaaa

SEQ ID NO: 4805 - DNA, 349 bp, Cyanidium caldarium
  Clone ID: LIB190-049-Q1-E1-B6
gggtcgacccacacgtccgaccacgcgtccggcagaatggacgacaggcttccacgtttcaaaagaaacctccaaaagatggcttaataaaaggcaaattttccttaacccttttggcaaatttccttttggtgaaaccatggccatcatgaaagcggcggtcttggcatccttggcctaaacacaatgcgccgttgcaatacaagcttctcctctagaggacactttgggtgcctttatgcggggtggttatcactcgcaaagccaagcaccaaaccctatctgttgcaagttgagctgtcattatacccaattttgtgaacaatttatcgtccaaactcaagaggtc

SEQ ID NO: 4806 - DNA, 355 bp, Cyanidium caldarium
  Clone ID: LIB190-049-Q1-E1-B7
ccgggtcgacccaaacgtccaacatcatatcgagccacgatgaaaactggatgcttactggaaatcacacaggcattgtgaagtactggcagtccaagatcaacaacctgaacgcatttgtatcccacgacgaatccattcgagacattacttttgcagtttctgacgtaaactttgccacatgttcggatgatgtgacgataaacatatgggacgtattgagaactgcggatgctttcgattttaccgcatgcgatgaataatagcaacttacaggacatggctgggatgtacgttgcattgaataggatccgcagtttccgaatattgcttcgggctccaaagattctctact

SEQ ID NO: 4807 - DNA, 376 bp, Cyanidium caldarium
  Clone ID: LIB190-049-Q1-E1-B8
gtaacggtctagaagttcccgggccgacccacgcgtccaaagacatttcatggcacccaaggaacgtagtaaaccaaagagtcgctcttctaaagccggccttcagtttccagttggacgtgtaagtagattcttaaagaatggaaactatgcagaaagagttggagctggagcacccgtgtatttagctgcagttttggaatatttgactgcggaagtgttggaactggcaggcaatgcagctcgtgataacaagaaaacccgtatagttccacgtcatattcagttggcagttcgtaacgacgaagaacttaagaagctgttgggcggtgtgactattgcttcaggtggcgttcttcccaacgtccatcccaat

SEQ ID NO: 4808 - DNA, 303 bp, Cyanidium caldarium
  Clone ID: LIB190-049-Q1-E1-C1
gacgcacgcgtccaacttgcaacagatccagtgtcgatgttgggtggtttacagtccagtccttacttgttattaacgcatttctttgccgttgctctctacggatgcggaaggcagttgaaatattttcctagttgggaacgagtgagaacgagttggtctctgtttagacatgcattcaatatcgtgaagcctcttattgatgacgaaaacgtcacctttctcagcaagattcctatatcacacatatgattttgttgtgatgtggagaacacttatttaaacgtttgtatttttcgcttc

SEQ ID NO: 4809 - DNA, 364 bp, Cyanidium caldarium
  Clone ID: LIB190-049-Q1-E1-C2
cacgggtcgacgcacgcgtccaatttcatttcacattctccttgtagaaaactatgaagtctttcggaattgctattgttttcctaagctttgttattgcatcttatgcagcagttgtatccgaaatggcatccaatgagtttcaaagaggaggatacgctccttctccttccaaggaatgctgcatgaccacttgtcaatatgcagaactttgcccaatttctcaaccaacttatagccaagctccatcttacattccatctcctacctatggccaagccccttcctacaatcaatattcttcttcgtacggttcctctagctatcgtctcttaactgcagacgaaaaccaacttgtgagcag

SEQ ID NO: 4810 - DNA, 363 bp, Cyanidium caldarium
  Clone ID: LIB190-049-Q1-E1-C3
aattcacgggtcgacgcacgcgtccaaatactatgaaattgagtaatccctcttatagcgacctcaatcagttggtaactgcagtaatgtcgggaatcacttgttctcttcgttttccaggacaactcaatgcagatttgcgtaaattagctaccaatctgattccattccctcgtctacactttttcatgattggattcgctcctttagctgctcccggaacgcagcagtacaagtcaagtagtattgctgacttgtgtcaacaaatctttgattctcgtaacatgatggcagcatgtgatcctcgtcatgggcgttaccttactgcagcagcttatttccgaggaaaggtgccaaccaacg

SEQ ID NO: 4811 - DNA, 356 bp, Cyanidium caldarium
  Clone ID: LIB190-049-Q1-E1-C8
ccgggccgacccacgcgtccacccacgcgtccgcccacgcgtccgccatgacttggcagggttgattacttctcgggaattggctcaatattttcattctttggaaactaatgtcgtggaagaatttgagaatatcctagtaaaagatatgttggatcacaacaaggacaaagtgcgtgaaaggttgcatgatcaatccatcctagcgttgcaagtatcctctagagtgaaagatgctgtggagttgatggcacagtatggagttggttgtattttggtaactagtgaccatagcaaaggtgctttgcatccttatcctgatgttgttggaatgtttacggaaagagaattcattc

SEQ ID NO: 4812 - DNA, 372 bp, Cyanidium caldarium
  Clone ID: LIB190-049-Q1-E1-D1
gtcaagaattcacgggtcgacgcacgcgtccaagacattctcatcgagaggaagagagtggcagacaagctttttttattgttttcaagtctctccaagggccttttaaaggaaaaaagtttgaaatcccagagtggaagcctgtcatttttaaaagaagtgaaacgagtttgaccccaagttttcataaaaggctaggtgaagtttgcttaccagaccccgacgtttcacgacttcacgccaaagtttcatttaaaggtggtagatttgggatagttgacttgggaagcttgaacggaacgtttttgaacgataaacgactttctgcggaacgtgtacctttggacgaaccggttgttttgagcaacggag

SEQ ID NO: 4813 - DNA, 413 bp, Cyanidium caldarium
  unsure at all n locations
  Clone ID: LIB190-049-Q1-E1-D10
ggtctagaattnccgggccgacccacgcgtccacttgtacgcacttttccatttgtcggcaaggcgtgggaagttttcccgtccttttcgtatccttctgttagagtatctcgtcaactgttttcaggttttggtcttgcaacaatggctgctgcaaacacaaaggaactagaaaccaaggtgagggacaggctggtgcaactttacaagcagactccttgtatgccaataatggtaagaatagcttggcacgacgcgggaacatatgatgtgaataccaacactgggggagtaaacggatcagttcgttttgacgttgaacagaagcataaagccaacgctggtctcaaagttgctttggatttattggctcccatcaaaaaggactttcctgagatcagttatgctgacct

SEQ ID NO: 4814 - DNA, 433 bp, Cyanidium caldarium
  Clone ID: LIB190-049-Q1-E1-D12
ggtctagaattcccgggccgacccacgcgtccacccacgcgtccgaagaagagaaaagccgtactgaagaccgacacaggtactcgaggagaaaggagacccaaattaaggtgagagaatggacgataaggaactaggcaaaaggatatggtatctgcggtagaacatatgaaagaagcagcaccgactgtttagcaaaaacacagcactctgcagaaaagagaaaatgtaaagtatagagtgtgcggcctgccaaatagtagagaagaaatcgatgaaagtgaaagcgagtaaaagatgaggtatagagaatggcggtcctaacagtaaggatccaaaggtagcgaagtaaatagacgtttgaaaggcgtccagtatgaaaggagaaacgagtgtagcactgtctagtcgtccaactcagcgaaacagcaat

SEQ ID NO: 4815 - DNA, 363 bp, Cyanidium caldarium
  Clone ID: LIB190-049-Q1-E1-D2
ggtcgacgcacgcgtccgaccacgagtccgcgtcgttacggtttacgattgttagtgcggtttggatatggcagacccccaaactgaaagagcgtttcaaaaacatgacgctatatctttaaagcagatcgctggagtatccaaaaagaatgcaagatggtacaagaatattgggttaggaatcaaaacacccaatgaagccatagagggagaatatatagacaaaaagtgcccttttacgggaaacgtgagtattcggggaagaattttgagaggaacagtggtttcaacgaaaatgaagaggactgttatcgttcgaagagactatcttcactgggttcgcaagtacagacgatttgaaaa

SEQ ID NO: 4816 - DNA, 357 bp, Cyanidium caldarium
  Clone ID: LIB190-049-Q1-E1-D4
cgcacgcgtccgaccacgagtccggaagaaaagagagagaagaaagaaaagaagagaaaagccgtactgaagaccgacacaggtactcgaggagaaaggagacccaaattaaggtgagagaatggacgataaggaactaggcaaaaggatatggtatctgcggtagaacatatgaaagaagcagcaccgactgtttagcaaaaacacagcactctgcagaaaagagaaaatgtaaagtatagagtgtgcggcctgccaaatagtagagaagaaatcgatgaaagtgaaagcgagtaaaagatgaggtatagagaatggcggtcctaactgtaaggatccaaaggtagcgaagtaaat

SEQ ID NO: 4817 - DNA, 260 bp, Cyanidium caldarium
  Clone ID: LIB190-049-Q1-E1-D5
gacccaaacgtccagttccacttcccgtgtacatacacgagaggactccttgtgccgccgttggacataatgctacaaggttccgaatcacagtcgtgtcggtcaccttggggtgtaatctcacagttgtattaatcacctaagtgtaactatgggatgtttaccccatcactgttcagatagtatacttaatctgcctgtgaaattgtagctctaactcccacagtcagtgctggataaacagatattcaaattgaggg

SEQ ID NO: 4818 - DNA, 371 bp, Cyanidium caldarium
  Clone ID: LIB190-049-Q1-E1-D8
ggtctagagttcccgggccgacccaagcgtccaggagaattttgtctgcaatagtatgaagcaagtcgtgactgacacaatagacttgctagaaagagtagagcagagatgcatagaatgggacaaaaagacagaaaagctttcaggagaagtgaaacaagaatatttgtcgtttttggcgccttttgtgtatcagcgctttctcgtgtgtttgtttacttggaacgctctgttgattgaatgttttcattctaatttctttgtagtcgaaaccattcgagggtttgttacactgactgttggtgcccctgttttagctcttgccgctagtctttcgtttgcgcattattatcgacgcaaaagtatgccga

SEQ ID NO: 4819 - DNA, 426 bp, Cyanidium caldarium
  Clone ID: LIB190-049-Q1-E1-D9
ggtccggaattcccgggccgacccacgcgtccacccacgcgtccgcccacgcgtccggccatgcttatcgtgaccctatcacggaatttgtcgaatgtttgtatgtgaattacgactttgaaggagcacaagatttgttacagaaatgtgagacaactttgaagcacgactttttcttgattggaacgttggaggagtttttagaaaatgccagactatttgtttttgagatatattgcagaattcatcaagtgattgatttgaatatgttggctgccaagttaaacatggaccgagagtctgcggaacgttggatagtgaaccttattaggaatgcacgtctagacgccaatgtggatagccaagcaagtcacgttatcatgggagtgaaaactccaagtgtctacgagcaaattgtggattcta

SEQ ID NO: 4820 - DNA, 434 bp, Cyanidium caldarium
  Clone ID: LIB190-049-Q1-E1-E12
ggtccagaattcccgggccgacccacgcgtccacgccaagtgtcaaggcaccttttgttgccaccgtaactgttccttcaggtttcaaagctgttatgagtggcatacttgtcaatcagaaggaatcttttgagacagcaaaaggaaatatacagaatatctattgttttgaacaatccattccagttccttcctatcttatctcattagccgtcggtgcctttgagtcgcaggaattatcagaaaggtgtcgtgtttggtcagagccggaaatcattgaaagtgcttgttttgaatttgggttaacggagcagtttcttaaaacagcagagtctgttgcaggcttctatttgtggtcgagatatgacttgctatgtcttcctcctttttttccatatgggggtatggaaaatccatgtttggcttttgttacg

SEQ ID NO: 4821 - DNA, 362 bp, Cyanidium caldarium
  Clone ID: LIB190-049-Q1-E1-E2
ggtcgacgcacgcgtccaggttgtagttgggtcgtcgcgttttggtgacaaggaaagataaatggtcgtcaaaacagaaacctgtagtttttcaggtttccgcatctaccccggaaaaggcactcgatttgtgcgcggggatggcaaactcctcatctttagtaaccgcaagtgcaaatcctactttcatatgcgtaggagaccggcagagttgaattggactcagttgtatcgaagaatgcacaaaaaaggacagcaagaggagacacagaagcgacgtcgtacgcgcaaagttgctgctgtaccgaaaccggtggaaggcgcgtcgttggaagtgatcaaagcaaagagaacgcaacgcc

SEQ ID NO: 4822 - DNA, 368 bp, Cyanidium caldarium
  Clone ID: LIB190-049-Q1-E1-E3
aattcacgggtcgacgacgcgtccgggtacaattacgttgtggatgcgcaatgattgtttccgtggcaactcctgaagtgacaactactccttctactctagagaaaagacgaaatagtgactcgttattaccttcacaagctgaaagtttaaaagatggtttcaaacaagtggaagaacaacacagacgagatttaaaaaagctcgaaaggcggtataaaagcgctgtgaaacagctgcaactgaagcacagggtatgcaaagtgttgaaagcaaagaatacaggtggtgtaagtaaggaagaggagaagtgacccataaagtcatgagggagattgtgggagtgggaatgttgcctcttcatcctt

SEQ ID NO: 4823 - DNA, 376 bp, Cyanidium caldarium
  Clone ID: LIB190-049-Q1-E1-E4
gtctagaattcacgggtcgacgcacgcgtccagtgcaaatgtggtgactgcaaagcgaccttctagtgttgttaaggatgcgcttcacataacgaaagatatcaattcaatcgaaggcctttcatggattaactttgcttttacgctattcctttgtggagtagcagcagttgacggattgttggtgggagataagaccagcagctccggcaaacagaatacaggagcgaacaatgcttgagtttcttgagaagttacaaatagtcgtgtctatgaagttgtctgagttgcgtgagaaaagacaagtagttgtgtctatgaagttgtcgtaaatagttgatgtgtgttgtgttgttttgccacagaaaggatgttt

SEQ ID NO: 4824 - DNA, 55 bp, Cyanidium caldarium
  Clone ID: LIB190-049-Q1-E1-E6
tatatctttgttcttatatgtatgttgttgaagctttatatcttgccactctgga

SEQ ID NO: 4825 - DNA, 310 bp, Cyanidium caldarium
  Clone ID: LIB190-049-Q1-E1-E7
ggtctggaattcccggttcgacccacacgtccaggaaatcgtaggtaagaaagatgtcacactatcttttctacatctcctatcacatatgatggctgttagcagaactatattttgccacttatgaattaattttaggctcaacataacgaagacatcattgcatactgaactggaaatgagtagagacttactaggacatatgagcctgcatccaccgatatttctctttatgggacatgaaatcgttgaacttctgttagtattggtaattacacagcataatatggctatggatacgtctgaggat

SEQ ID NO: 4826 - DNA, 373 bp, Cyanidium caldarium
  Clone ID: LIB190-049-Q1-E1-E8
ggtctagaattcccgggtcgacccaagcgtccaggaaaagttgtccaacgagaattcttcaaatgttcccggagaatatattctagtacacctgattgttgcaagtgaaggaaaactttcccagttaccctctcagttgaactcggaatccgatgtccgagaagcattgaagattctttctagtacttggagtgataagcttcaaggacttgaaataatctgggttcctcaggctatagacgatgtgttaactgagaaggaaatgctcctacagcatcccgagttgcaacgcatttcgtaattgagacgtattgtttggtgatgagtttattgagtaatgttttaagggttagtagggatatagataggattg

SEQ ID NO: 4827 - DNA, 359 bp, Cyanidium caldarium
  Clone ID: LIB190-049-Q1-E1-F1
ggtcgacgcacgcgtccgaccacgagtccgcgaggatttgcgtgcgatgtgggtttgcttctccttgtggttccttttttgaaactagagcgtttcacaagagtgcttgtcataattcatccttttacggaaacagaacttttcgaaagcaaccccagagaaatgtgttgtattttgtagcgggtttcggtaacctgcgttgtaccattgaaagcctaaataccaagcaagctcccgtgcaatatgtttctttagcgaaagagttacagacagctctaatcaaacttttcaaagagaagagttcagactcacttgaacaacttcttgctggagattgcgtttggaagaattgcataaag

SEQ ID NO: 4828 - DNA, 413 bp, Cyanidium caldarium
  Clone ID: LIB190-049-Q1-E1-F10
ggtctagaattcccgggccgacccacgcgtccaaatttaaaaaacaaaaatctgcaaggtgaagcattgccttcgcaaataaacacatcagaagatacataaaatatggctctcttcgtttggctcttgcttgcgacggttccgcagagttgttgtttgtgtgtttgtctttggcgagagccattcctcgttgctttgttttttgtgtcctcttttacctggctgttgatgcgcagcttagtacggctttcttggatagctacctctcgttacgtaacaatgtattctttttgggttcttctatcttcgtgtttggaggaactcgcatgatgtttcgtttataagatatataggcacctaaaatctgctttatgggaatcaaatgatgcttcaaggtctgaagactatccaca

SEQ ID NO: 4829 - DNA, 437 bp, Cyanidium caldarium
  unsure at all n locations
  Clone ID: LIB190-049-Q1-E1-F11
ggtctagaattcccgggccgacccacgcgtccaaccacgcgtccgcccacgcgtccgcagtaaatgaggcgagaaagcataggaagtgaaacggattaggaacccgtgtagtctatgcagtaaaagaaagaatgagtaagaaaaaagggagtcattccaccaggggagtaaaggcgcaagaaagaaacccaaagcaattgacgggaatcggaaaaaggggtggatcacgtaaattaatccgataaaccgagaaccttacctctccaagaaggtgttgcacggctgtcgaaagaacgtgctgtgaagtgagagaacgtacgagaaagccaagtgaggaaaagaaggcaagtagagggcggcccgagaaaggagaaggcgtaagacgtgatacagagtaggaaganaagagaagagagctagaaaggaggtaaaagaag

SEQ ID NO: 4830 - DNA, 417 bp, Cyanidium caldarium
  Clone ID: LIB190-049-Q1-E1-F12
ggtctagaattcccgggccgacccacgcgtccaggttgctcaaggtgtgaaatggcagtagttgaagataacagagtctttgttggtggtcttccttggtcagttagtgaagaagaccttcgtgaaactttttccaaatatggagaagttgttgatgcaagggttgttgttgaacgtgaaactggtcgttcccgtggttttggtttcgtatcctatgcagaatgttcctccgtagacgaatgcattgccgcactggatggcaaggatatgcaaggacgcactattcgtgtgaacaaggcaatgtctcgtgaacaacgcgagagtggaggagactttcgtcgcggtggtcgtggacgatacggaggttttcgttccggtccttatgagagacgtgaacgtgactctgatcgtagaaga

SEQ ID NO: 4831 - DNA, 350 bp, Cyanidium caldarium
  Clone ID: LIB190-049-Q1-E1-F2
cgcgtccacgggatagttgtatgatttcttcctggaaagtgctcgaaacattctctctttgaatacacacaaaatacgctctgttgtgaaagcacctggaatggaactagaatatgagggtcacgtttcttgtaaaagcgaaaacgatgaagacgcgctgtatgaaagttctttaacgttgggtgataacgaacctacagtaagtattcccataacatcatacaggagacaaacggtgaactgtgagcacggaagaccagcggtgggatcacctgaagaactggtggaagcagaaagttatacggaacctgacaagtgggaagagtcttttcacgaagacactgtagttg

SEQ ID NO: 4832 - DNA, 367 bp, Cyanidium caldarium
  Clone ID: LIB190-049-Q1-E1-F3
attcacgggtcgacgcacgcgtccgaccacgcgtccgcccacgcgtccgcacagtttgacatgagagaagttgtcctgcataccattttggttttcctcgatgtctattggggcctcataaaagaagtgacacctatgtttgcagaatatcgatatcaagtccttgtagaagaagacacattggaaggccatctgagtgacaagcagtacattttgtggaaaaatgtcagtgctcaagcaaagaagaagttgaagtggagctatcttgatttgagcaacttgcctctggacatcgacatggaacaagtgcagcgactatttgatgaagtgcatacaaatggtttgataagattacaagcaggtaaac

SEQ ID NO: 4833 - DNA, 368 bp, Cyanidium caldarium
  Clone ID: LIB190-049-Q1-E1-F4
aattcacgggtcgacgacgcgtccactttgtatgcgtctatagaggaatgtctgcctcacgaaagacttttcttgtcggagtcctgcaatactcgtttttcgaaatactcaatattcaaagttttatttcatagttacctagcactgctggctatccactattttcagatgataggccaagtgacagaaggtcgtcaagattggtaggcatttcagaggtttgtggagaaatctcttccctggtccaactgtttggctgtgtgtttttaccctggaagcttgttgaggacttgggagtttcggccgcctgtatctcttctttcacaggcttcttttggccctttcttttgttgtcaaatatttccaga

SEQ ID NO: 4834 - DNA, 370 bp, Cyanidium caldarium
  Clone ID: LIB190-049-Q1-E1-F6
ggtctagaattcccgggtcgacccaaacgtccagcggagttggtggctgtgagggtgtgcagttgcttgggtgtgtcttttcacgtaacatatgcttttcaaagcaccgtttgttggaactttgaagcgaaattgagttgccaaacacgaaatacttttagaggtgaaggacttttgtatgttcgccctattttcaacccaaggagctttctttaccagtgctagcatattcaacgttgtggacttgttgcatcagtacaactcgacgagagtacaaagaacgacggcttggcaagttttcactggacaaagatttttgttcccgacggtatgagaattgacagacagtacgccaacgtccggttggaag

SEQ ID NO: 4835 - DNA, 338 bp, Cyanidium caldarium
  Clone ID: LIB190-049-Q1-E1-F8
ggtctagagatccccgggtcgacccaagcgtccaggctaggtttcccactgagctacctggacacctctggtgatttgactcctgctgttgctttgaataatactataatgaatgttgccttaatgaaacctttcggcagcagacaccctgacgaaagtgatgctgtttctagtgcagctgctgctcaaggagacggagttcgaaacgtattgtcaaatgacatgtcgcatctgccgcaagacgagtcgatagaacatcccatctcacgtgacattgaagattatcataaagtgccatgttaattgatttggatcttgttcaagttaatgttcaagtc

SEQ ID NO: 4836 - DNA, 443 bp, Cyanidium caldarium
  Clone ID: LIB190-049-Q1-E1-G12
cggtctagaattcccgggccgacccacgcgtccaatgaaatttccaaagaaatggacctttacttgaagaaagtcggatataatccagcaaaggttccaaagatccctgtatctggatggactggagataatctttttgagaaagttcctgccgatcatcctcttggaaagtggtacaaaggaccttgtttgttggaggctttggatatgattgacccgcccactcgtccagtagacaagcctctacgtcttcctctacaggatgtctacaagattggaggtattggaactgttccagttggacgcgtagaaactggtgtcttgaagcctggtatggtggtaacctttgcaccagttggtttgactactgaagtcaaatctgttgaaatgcatcacgagtctattccggaagctcaacctggtgacaatgttggcttcaacgt

SEQ ID NO: 4837 - DNA, 349 bp, Cyanidium caldarium
  Clone ID: LIB190-049-Q1-E1-G2
gcgtccatctcatagttgttgttattgaggaacacggaggacgacagtagcgatgggattgtttagtagactgtttgtgaaaccgagtcgtgtaccgcaaagagtcgtagagtttcaaaagcgcaaggcggaaggttactttacatacaacgccgggaagtacgaccgatacatcaacacacctatttacctgtttgtgtccttcaccggtctttatgcctttattgacggttgtctttgggcggcaggaaagaaggaaagtcaatcgtgaatagcgttttttgtccttgtggacagtcttatgaactagtgattcgtttgttctgccagttttagtttcctgtaatga

SEQ ID NO: 4838 - DNA, 358 bp, Cyanidium caldarium
  unsure at all n locations
  Clone ID: LIB190-049-Q1-E1-G3
ggtcgacgcacgcgtccggcaataattccgttactatgtatggagatggtgctgcgaaccaaggacaagtagcagaggctatgaatatggcagcgttatggaagttgccttgtgtttatgtatgtgaaaataacaagtatggaatgggaacgagcaccgatagagcttcagcaaataccaacttttatactcgtggagatgtcattcctgggattcgagtagatggaatggatgtattgtctgttcgagaaggaatgaagctcgcagttaattatgctcgttctggaaagggaccttttgtagtagaaagtgttacttatcgctatcatggccattctatgtcggatcctgngttgtc

SEQ ID NO: 4839 - DNA, 360 bp, Cyanidium caldarium
  Clone ID: LIB190-049-Q1-E1-G6
ccgggtcgacccaagcgtccacggacgcgtgggtgagattgaccatgcacgtgttctaattaccagtcccgctgcacgttggtgacacctaaataaaaagcagacgtagaacaagaattttagctgttccagaaacaagaacagcaaatgcgcaattggttggtagcagcaagcagttagcttgaacagttgatcttttgttcaagtgtttgtacaaagagtcgatttcttcgtagttcaaagtcgagttctcctgtcgctcagaataagacaatctcagctgtgtttacggcttatctcaacgtgaagatgtcgatgcaacgtgaagctttttcgtgcaacaagcccgacaagctagtc

SEQ ID NO: 4840 - DNA, 373 bp, Cyanidium caldarium
  Clone ID: LIB190-049-Q1-E1-G7
ggtctggaattcccgggtcgacccacacgtccacgtgtagtctatgcagtaaaagaaagaatgagtaagaaaaaagggagtcattccaccaggggagtaaaggcgcaagaaagaaacccaaagcaattgacgggaatcggaaaaaggggtggatcacgtaaattaatccgataaaccgagaaccttacctctccaagaaggtgttgcacggctgtcgaaagaacgtgctgtgaagtgagagaacgtacgagaaagccaagtgaggaaaagaaggcaagtagagggcggcccgagaaaggagagggcgtaagacgtgatacagagtacgaagaaaagagaagagagctagaaaggaggtaaaagaagagtaaaa

SEQ ID NO: 4841 - DNA, 296 bp, Cyanidium caldarium
  Clone ID: LIB190-049-Q1-E1-G9
ggtctagaattcccgggccgacccacgcgtccaggcaaatccctgaaatcagtatcaaaatatggatagtcgcatgaactgactaccaagcttcacagagggagtacatgaggaccgacttatcaacgaagtatgagtaagagaaggtgtaatgtgtatgacagcatgtcagtagctgcatcatacagtgtaattcgcgtaccttttgcatactgtcgcagcgagtgaaatacgacctcttaagatttcataccaattaacgagctatcatccgcagcgagttgatcataggcggt

SEQ ID NO: 4842 - DNA, 317 bp, Cyanidium caldarium
  Clone ID: LIB190-049-Q1-E1-H12
acccacgcgtccgcccacgcgtccggggactcgacgattcaggatgtgcctgttctaaaggctttgatggatacgaaacataactgaatcatgtaacactatgaaaatgctaacttggacttgatggaacgtatctatcgaatgaaaatgccagagtcgaagaactttggatgtttggtatttactagagccgtgctctagtgttagacaaggcaaaatgggaaagctaaaaatgattcggttccagcaaataactgtacacattggattatcttgtgacaataaaccaatcttccaaccatatcaaagacagaact

SEQ ID NO: 4843 - DNA, 362 bp, Cyanidium caldarium
  Clone ID: LIB190-049-Q1-E1-H5
ccgggtcgacccacacgtccgaccacgcgtccgcccacgcgtccggagagaatcgatcgcgcacttgatggctttcgtaggattctccaacgtcaagtacaacacgaaaagtccgcatgtcgtctgtttacaaaccagcaaaagagaaaggagatggacaacttgttttcatggagaccgttcttgctttctaggtcaacgacagtcttttatcccaacaccgttacgacgacgttccgacctgaaaatgaccgcacaaaccaaagaagccggttcggaagccaaagaaaagacttttgaatttcaagcagaagtttccagagttatggatattatcatacactctttatactcccacaagg

SEQ ID NO: 4844 - DNA, 325 bp, Cyanidium caldarium
  Clone ID: LIB190-049-Q1-E1-H6
ttcccgggccgacccaagcgtccacccacgcgtccgaagtttggttgttttcttggtagcagttgtacattcaacatcatcaaatgccaaagggaggaaagaaagattcttcaaagaaagaagccacaagtaaacctgcagcagcagatgctacaaagacgacagaaaagtctggtccggaagccaagttgaagggaactggtgcaaagaaacaataaaaagttgactatgcatgtgcagtcctgttatgttttgtgagttctgtttgatagtttccagctattcttttggtagtgaataaagagaaaattttttatatttacac

SEQ ID NO: 4845 - DNA, 371 bp, Cyanidium caldarium
  Clone ID: LIB190-049-Q1-E1-H7
ggtctagaattcccgggccgacccacgcgtccaagcttctccaaagaaaatcgcagagtacacaattcgtacgttacagcgtactgtgccagctgccgtacctggcattgtctttttatcaggtggacagtcagaagaagaagcttccgtgaatctcaacgccatgaatcaagtggagatgatcaagccttggaaactttccttttcttacggacgtgctttgcagtcttcatgtctgaaagcatggcaaggaaaggcagagaatgtccgagcggcacaagaagcctttttagttcgtgcaaaagcaaatagtgaggctactttgggtaaatatgccggaggtactgggaatagcgaatctttgtttgtca

SEQ ID NO: 4846 - DNA, 303 bp, Cyanidium caldarium
  Clone ID: LIB190-049-Q1-E1-H8
cgggtcgacccaagcgtccaatcagagtaaagaaagaaggaagatgagaagaagagagggtaggcttagaagcagcaaaccagagaggaaagcgttaaagcatgaaagaaaagaaatccgaaaaagaagagaaaaaggtaagaaagaggaccgaatcagggtaagaggtagaggagcaagaagagaagagagaatgctgggtggagtagcgaaacaagagaagggaagtaaaaggtaagaaagaggaaaggtttacgagagaaggaagtagaaagaagagagtgtaaggcggcgtcataatag

SEQ ID NO: 4847 - DNA, 400 bp, Cyanidium caldarium
  Clone ID: LIB190-050-Q1-E1-A1
ggtcgacgcacgcgtccagagctgtttctagagtattgcgaattctccgctttgttccagaagagactgtggttttcgctactagaagaaaagtaccttttttagtatttgttgaagttgtcgaaaccaatatgttgtgttgtagtcaatatgtgttttttgaacatatgctcatggatgattatgaagaaacacatgacaatgacatcgtagcagtcatggagagtcgacacttttcccatcgttcaaagaggactttttcgaccgaagaaactcctccttcaaaggaatcaagaagtggaagtgtagattcttcgaccacgccggagtagtaaacacaacgagcatgtacgaactgcggtctatggaaatgcggaatccgctgtcgatatggatgcct

SEQ ID NO: 4848 - DNA, 456 bp, Cyanidium caldarium
  Clone ID: LIB190-050-Q1-E1-A10
attcccgggtcgacccacgacgtccacggacgcgtgggttgcagtttccgagataagatgtcggaatttaacgaacttaatgcgaaagttttcggtgtgagttcggacagtgtagagtctcagaagtcgtttgccgatgaagaaaagttgacgtttcccttagtatctgatgaaggcggtaaagtacgcaagctatacggtgtaccaaagagcatgtttattatgcctggtcgctgcacttatgtcattggtccggatggtattgtacgacacatctacaacagtcaagtaagtttcgcataccacgtggaagatgcaaagaaggcgttggtaaagatactagacgacacgcatacaggagaagagtgaacacactagactgctttgcggcttctttgataagaatagggttccagtcatgtgcttcggctggtgtggcaagttactttgtaagtt

SEQ ID NO: 4849 - DNA, 455 bp, Cyanidium caldarium
  Clone ID: LIB190-050-Q1-E1-A12
ttcccgggtcgacccacgacgtccagactttgttttatcagcagcagatactgccaacgcgcgttcggtcatagtaatgaaagacgatgtggacaagatattggagctggatagtcataagaccttagctatgggtggggagccaggtgactttgtgcagttcacggagtatatacaaaagaatcttcacctttacgaattccaaacgggattgcaactaagtactcacgcagttgctaacttcatccgtggggaattggctagattgatacgggaagcccccgtattaaccaacctacttttggggggttatgattctgtgtccgggccttcactggtatacatcgactatcttggtactttgggaaaactagactatactgctcaaagatatgcgtcctcctttattttgggaactctcgatcgatattatcaaaaggatattacactggacg

SEQ ID NO: 4850 - DNA, 364 bp, Cyanidium caldarium
  Clone ID: LIB190-050-Q1-E1-A5
ttttcttccctcgccgcatttgttgtgtgtgttttggtcttatcatctcacgagccttttgtaacgagaagaaatggttcaaatatttgctgaccttggaaagacagccaaaaagcttttggaagatgattactgtttcgataataaagtgacgttgaaatcagcgacgagtaatggcgtgatatatacttcggaaggcgttcaagattcctttagtggttcagtttctggtgaattgcaaggggaatacaaacagaaaggttataatgtaacaaccaaactgaatacctcgggcaccttcttttccgaagttgccttggaagaagtgggagtgaaaggtcttcgagttgtactgaacactacg

SEQ ID NO: 4851 - DNA, 446 bp, Cyanidium caldarium
  Clone ID: LIB190-050-Q1-E1-B10
attcccgggtcgacccacacgtccacaccgattgagggtttcatcatcttatttacgccatgagaatcctgcaaaggccaactgaaagcgcccttatagttgttattctctactgtttggtgtcccttgttttaagtgaacaacaggaaactccttctttaccttcctatacgttgactattgcggctgaagtcttcaacgaagatgcacctcacccgttgagtagaaaccttccttcttccaaagagatagaagtagcatattcttttagtgttgcaacggatgaaaaaagtatacagcctgagactctggtagattgtttagttggagtggcaaatggaggaccttttccatatcgaatattagcagttggtggagctttgcactcccctttgcaatttaactattatgttcacaactttactctcctttatgtcaactatact

SEQ ID NO: 4852 - DNA, 461 bp, Cyanidium caldarium
  Clone ID: LIB190-050-Q1-E1-B7
gacccacacgtccacagagaggaaagcgttaaagcatgaaagaaaagaaatccgaaaaagaagagaaaaaggtaagaaagaggaccgaatcagggtaagaggtagaggagcaagaagagaagagagaatgctgggtggagtagcgaaacaagagaagggaagtaaaaggtaagaaagaggaaaggtttacgagagaaggaagtagaaagaagagagtgtaaggcggcgtcataatagaaatccgaaaggagtagaagaaaagagagagaagaaagaaaagaagagaaaagccgtactgaagaccgacacaggtactcgaggagaaaggagacccaaattaaggtgagagaatggacgataaggaactaggcaaaaggatatggtatctgcggtagaacatatgaaagaagcagcaccgactgtttagcaaaaacacagcactctgcagaaaagagaaatgt

SEQ ID NO: 4853 - DNA, 430 bp, Cyanidium caldarium
  Clone ID: LIB190-050-Q1-E1-B9
gggtcgacccaaacgtccagtctgttatgtactggtgaagaggatcaggctgtccttatatgggatattaagacacgtgctgtcgggctgacattgagtggacaccttggtcatgtatattcggtaaacactttcaatgatggaagattgttggcaagtggtattggagatcagtctgtcacgttgtgaaacattcaatatggtcacgaggagaggacattgaattgttcaggtcttcagaaaggacctggtgatggactaacttctgtttcagtgagtcgtcgtactccttatcgtaatgcatctggtgcattgtgatcgaactgatagtattcgatgtacagaccggtgaacttttgctcaattatcgtcaacatgcatagtcagtagattctgtagcattctctagcaatgtatgatagctcttatc

SEQ ID NO: 4854 - DNA, 444 bp, Cyanidium caldarium
  Clone ID: LIB190-050-Q1-E1-C10
ttcccgggtcgacccacacgtccagtagcgaaacaagagaagggaagtaaaaggtaagaaagaggaaaggtttacgagagaaggaagtagaaagaagagagtgtaaggcggcgtcataatagaaatccgaaaggagtagaagaaaagagagagaagaaagaaaagaagagaaaagccgtactgaagaccgacacaggtactcgaggagaaaggagacccaaattaaggtgagagaatggacgataaggaactaggcaaaaggatatggtatctgcggtagaacatatgaaagaagcagcaccgactgtttagcaaaaacacagcactctgcagaaaagagaaaatgtaaagtatagagtgtgcggcctgccaaatagtagagaagaaatcgatgaaagtgaaagcgagtaaaagatgaggtatagagaatggcggtcctaacag

SEQ ID NO: 4855 - DNA, 420 bp, Cyanidium caldarium
  unsure at all n locations
  Clone ID: LIB190-050-Q1-E1-C12
ttcccgggtcgacccacgacgtccagttatttgtagtattagctctatcatgtgtagttgtgtttgccatgggatctcctatcatggaaaaacaaagatggtatccttctacgtattctagttatccttcctattcctatccggtgtatccttcctattcttatccggtgtatccaactgttcaaccttatgtttatcctacagtgcagccatatccaacttatacgccgtattattcctccagttattctacctatacacaaaacagtggattctactttcccaattattcaggacctgttcanatctatcctctgttttcctaaatgccggaaccaatgatagtttccttttccgataatgtgttgggttttgtttcttctttttcgataaacttgtggtttggatttaaaataaaaa

SEQ ID NO: 4856 - DNA, 427 bp, Cyanidium caldarium
  Clone ID: LIB190-050-Q1-E1-C5
ggtctaggattcccgggtcgacccaagcgtccactattttgcaacaacatgaacaaaatttctctagtttcctttctattatttggagttgtcatatatgcagttgcaggacctctcaaagactctcatatagcttccaaggttagaggatacagcagtcaatatactccaacctagactagcgagtatactccaagctatagtagtgaatagactcctagctatagcagctcctatagtccagtttattcttctccttatcaatcctcatacagtcctacctatacaacttatcgatggattcaaccttgtgctcaagcttgtgcgggatgcctttattgctatcaacaatacaatttctattatcgctacggtcttgatatcctctactgcaagaactttgacaaatactgcccatctggatatg

SEQ ID NO: 4857 - DNA, 401 bp, Cyanidium caldarium
  Clone ID: LIB190-050-Q1-E1-C7
acgtccacccacgcgtccgcaggcatgtctagctggaaggaacgactagactcgtggattggaaggagtagcagtgaatattccaaaggtggcaactcttctccagaagggggttcatctcctaaattgggtagcagtccttcgaaactaagcaaaagtcctcgcgctcaagaagtttggagtaaaacagtgcatccttgggggcgttcttactcaggaaagaaacgttatgacaccgtggagaaggacacagagaaggaaccaaatatatttgagatacatgatctgtcgaagaaacagagcgggagccaataagaagagagtttgtgagttttcaatagaatactgtgcttgttgttataattttctataaatgattgtacatgctgttttaagacaaa

SEQ ID NO: 4858 - DNA, 444 bp, Cyanidium caldarium
  Clone ID: LIB190-050-Q1-E1-C9
ccgggtcgacccacacgtccagttgattttcctctgggcgggggacgttcgtagagagaccgtttttgtcgtctgtccgtggaccgcaaatacaagcattcaagcacctctttattggatatcatttctatggacaaggtagaagaactaaagtcactggtcaattccgtggaagaagactgcaataaattttttgagaacggaaacaagtcagctggagttagagcaagaaagaacttgcaagaaatcaaaaaacttgctcaagaactacgcatagagatacaagcgacgaaacaaactgaaaagtgatactttcaactgtgcagaatcaaccatggcttgtgaaactattccagtttttcaaataaataccttttttcgtttgtaacccaaaaaaaaaaacaaaaaacaaaaaaacaaaaaaaaaaacacaaccaccaacac

SEQ ID NO: 4859 - DNA, 57 bp, Cyanidium caldarium
  Clone ID: LIB190-050-Q1-E1-D1
ggtcgacgcacgcgtccgaccacgagtccgacgaagaaagagaaagaaaaaaactga

SEQ ID NO: 4860 - DNA, 457 bp, Cyanidium caldarium
  Clone ID: LIB190-050-Q1-E1-D10
ttcccgggtcgacccacacgtccaggcagatccagtaaaagtgtacgtcggaggtctcgaagtggtagcatccgaagaagaagaagtgcaagtagagattcatcagccgagagaggaaatagcaggtccaataacggaagtgacaatgagagtgagcgtccttcgcgactttcgcgagaaaatagcagaaagcgtcggttaattgtatttgttgctggtggtgtgacggcttctgaaatgcttttggcttatgaactttccaagaactccaatcatgatgttattattggtggctctgtaatattgacaccgaggaagtttattgagaatctgaacaacgtagtgcaagattttggaaatggtaatcaactttctcccgctggttcgtcgtccgcattgagatagtttcggatattcccaatctcatcgaataaagtgtacaacaacgtttgtgttg

SEQ ID NO: 4861 - DNA, 282 bp, Cyanidium caldarium
  Clone ID: LIB190-050-Q1-E1-D11
attcccggtcgacccacgacgtccgattctgtagataccattatattatatctcggttgataccaaaagtcataattaaagtcgactcctttcatatctttttcccagtgacctagtatctggaattgctggtccagcaataaaaagcctcctgggttgtttgtaaaaaaaaaaaaaaaaaaaaaaaaaaaaaaagggaaaaaaaacaaaaggataaaaaaaaaaaataaaaatgaatgcaaagtcaaaactcttctaataatgtcacaaaaattcaattca

SEQ ID NO: 4862 - DNA, 149 bp, Cyanidium caldarium
  Clone ID: LIB190-050-Q1-E1-D7
gtcccgggtcgacccaaacgtccagtgaatcaaacctcaagacagctttacccctcgctgactgacacgcgatggcagtaagcatgtgattgattcaggatcaagttgacggacacagacgagaaataccagggaattgttcacgtcag

SEQ ID NO: 4863 - DNA, 433 bp, Cyanidium caldarium
  Clone ID: LIB190-050-Q1-E1-D9
cccgggtcgacccacacgtccacccacgcgtccgcccacgcgtccgggacaagtcctcaagacgcagttttatcaacaattatcagctgattcgatgtcgacgaggacagtttcgactattctgaaaacttggggtaatattacccattctttgatatgttcttttttgaaagacttggaatgatggatatatactttttgtcggtagaatgaaagctaaacctgtaatctatcgagatgcgatattgtttttagaagcaattttgatttttcttttttgtcaacgtagctacatttgcttcctttttgaatatatgatattgtacaagttttgacgttatgcagcatgagactggcaacttttgaacatcacaactctctacgagttgttagtaatacaccataaaccagagatgagcaatcttcagattcc

SEQ ID NO: 4864 - DNA, 445 bp, Cyanidium caldarium
  Clone ID: LIB190-050-Q1-E1-E12
ttcccgggtcgacccacacgtccaggagagaataaaggtatgaatgccaccgtgttgtcactggatatagaaaggaagagtgtcagtttgaagccagatacatagcagaatatcagtttggtactaaatgatgtacctctacattatatttgcaagagagctcaatagaagaagcaagtagcttttaactaatgttttgtgcattccttgttatagcgacctcagcagttggagaatatttatattgttgtatgcttatgtgttctttaataacgttatactgttatactttatacgttcgaatttataacaatgctgtggaagatgttgtgtggaaaacgtaaactttgctgaaataaagtcgtgtctataccgattaatttatgaggaaactcggggaatcgtcaagtttctaagatgttttgcggatgccttttttcagaaa

SEQ ID NO: 4865 - DNA, 439 bp, Cyanidium caldarium
  Clone ID: LIB190-050-Q1-E1-E5
ggtctagaattcccgggtcgacccacacgtccaggaaatggccaaacaagaagaaaaacactttgcatgtttcgaaaatttgttatatgaacgacgtagtcgtcctactttgttgatgcctctgtggaaagctgctggattttctttgggagctttgactgcgctcgtgggtgagaaagctgctatggcttgtacagttgctgtagaagaagtaatatcacaagattagaacgatcaaatacgtactattcatgagaagaaatggcaggatgaagaagcattgagagacacgttgagagagtttagagacgatgaaatggaacatcacgacagaggaatagaatatgacgccgagtcgtttcctttttatcgcgctttgactcgagtcattcagttgggttgtaaagctgctattgagattacgcgtcgagtataaaag

SEQ ID NO: 4866 - DNA, 238 bp, Cyanidium caldarium
  Clone ID: LIB190-050-Q1-E1-E7
cccgggttgacgcacacgtccacggtaggacgccatattccgtcttccgttgttttgtacgcacgctattacatagccagctgtcgtccgtttgctagtgtagtgaaggagatcaacaagggaagaggagcgtcgcaaaccgagcctcttgaagacgaggagggttttcaaacggtcgtgaagagacagtaacagagtagttcggaatgttccgaagactgcaggaggcccgcgagga

SEQ ID NO: 4867 - DNA, 447 bp, Cyanidium caldarium
  Clone ID: LIB190-050-Q1-E1-F10
gggccgacccaaacgtccgcccacgcgtccgctaaagtttcggagctccttggggaaaagatcaaggtcggaagcgaagaattttcaacaagggactcatcactggtggatgccgcttctctgttgagaccaaagagattggcgaaaaattttcctttgaagagttctggcagtagaatttctagagtctttttgagacaggacttaataaacctgtggaacgcactggtggatgaggaaaatactaacgagttgaatattttatctgctgctagtggtttaggcaagagtatatatctttatcttatcgctgtttttgcccgacactttggaatcccagtgcagtatattggaaatacaggagatctgctcagagatcgttctcatgaagagttagaagctagcaacaactttgcagcactgctgctgttcatgaatttgaagatt

SEQ ID NO: 4868 - DNA, 453 bp, Cyanidium caldarium
  Clone ID: LIB190-050-Q1-E1-F11
ccgggtcgacccacgacgtccaggcaaaagatggacgccgctgtggagtttttacgaaactgtaaacaacatattgacaaagccttggaccgtccctatctaacttccgactatttaaaagactttgttcgttctattcaatggacagaacccttcatattggggttaatatgtgctcacttgattctggcttttattacagtgaaaactagaaacaagaccaacttgcaaaactccatctttttcacttcagttattactgtattcaatgtgaagaacttgaacaagttagggtctgagaattggaaacaaatagctagcaaaaactatttcgacgagaacggtttctttatatttgtatttgtagctttacccttgttgttaatttggaactttattatgttgcacaatggttatttggctttacaaactatcaaggaaattagacgagag

SEQ ID NO: 4869 - DNA, 458 bp, Cyanidium caldarium
  unsure at all n locations
  Clone ID: LIB190-050-Q1-E1-F12
ttcccgggtcgacccaaacgtccacccacgcgtccgagctctcttatgaatgttgcggaatgtatagaatcgagcaatgttggttatgatttgtccttggttatcgagttggatgccttgttgggaacgatcatgcaatggagagggaatgaaacattggcacaacaatgcttggatagtataagaagaaaggattccttgccatgttttcatgaatcggagtcccaaaagaatatctgttcctgtgattatctgctggactatagtatgtggtcatgtttggagagttttgtgggtaagcagcgtagtagtagcgataataaggaagatgtttctcctgttacgtggataacgaaagaagatacatcggaatgctgtcgctatttgttggaaactggtttaacagcaatacaggaagaattggaatgggaaaaaaacattgcatnagctaaagtatc

SEQ ID NO: 4870 - DNA, 456 bp, Cyanidium caldarium
  Clone ID: LIB190-050-Q1-E1-F9
cccgggtcgacccacacgtccaaaaatgttcggactcgcgaggcaactcacctctagttctttaagatacttttcgactgaaataagttcaaaatcgcggtgcttaccgtgcgaaggaataggaaaaactttggaaaaggaacaagtccaggaactgctgaaaaaggtacaaggttggaacgtttcctctgataataagcaaatttccaaaaacttgcaactgcctgattttatgtcggctattcgttattttcagaaaatagctgatgtagcggaggctgaaggtcatcatcccgatttgcatttgactgggtataacaaagttagaattgatctgtcaactcatgctttgaatggcttgactgagaatgactttataatggctatgaagattgactctcttggacaaggagcctgaaaagatattttgcgaaataaagcaatagaacaatcagt

SEQ ID NO: 4871 - DNA, 427 bp, Cyanidium caldarium
  Clone ID: LIB190-050-Q1-E1-G10
ccgggtcgacccaagcgtccgaccacgcgtccgcccacgcgtccggagatttcgaaatagtcactacgaacaaatatacaagcagccttgaagccgaaaagtcacatcacacaactcaaaactcagtttcatctagtgacttgggaactattattcgaaaattggtggaaaaaatacatctcgattctttacaacagccatcactggtggaagaacaaagtacatttacgagacaatcagcatctttaataccagagccaacatccacaggaccttctgatttgttgctgtttcctccacaacaacttggtcccaatgtggtgcgcattccttggaaaggatccaatgttcgaacgttagagttgcacatcaatgtggttgctgaagaggatcttcgagtggcctcacctactgcaatattagcccc

SEQ ID NO: 4872 - DNA, 449 bp, Cyanidium caldarium
  Clone ID: LIB190-050-Q1-E1-G11
cccgggtcgacccacgacgtccaattgttttgaaaaagagaggcccatcctcaccactactacgagagaagaaaccatgactacgcagttagaaagaggagaagaaagcgttccacaacaggaagaagaaaatattcccgaggacgccaaagacttggccacctatgttcaaaacttgttgtctcagatgcagagccgttttcaaaccatggcagactctatactatgcagaattgacgagatgggtagtcgtatagacgaactggagaagagcatcgatgagttgatggaacagactggagtaaaggaaggcgatggaacagagtctggtgaggttactacgacaagtcgtggggagtgaatgcttcggttgtagtacgttggatatcttccatagtagctcgtactatctatccatttgtggttgcgtcgaagaataaaagagtgcg

SEQ ID NO: 4873 - DNA, 448 bp, Cyanidium caldarium
  unsure at all n locations
  Clone ID: LIB190-050-Q1-E1-G12
cgggtcgacccaagcgtccacccacgcgtccgcccacgcgtccgagcaataactgtgaaaatgcagtaaactagcagtaggacggtaagaacccataattcttgactaaataagtttaaggaagagagagaatcatgaagtagaggaagtggggtaagagatgaaagaccactgcatgaagataaggaatctaactgagtaaggaaaataagcttaagctaatttggctggggaagtaaagcctaagaaagagtaaattatgcaagcaaaggcatgagagaagtataatagcagaagcatgcttgaagaaaaagaaagagatttcagaaagggaagaaaagtcagctatagagaacaagtgaaggagaactcantaagatgagagcaccgaacgatcgaagaagaaactttgggggtaacacgttaatgtggtgttagagaacgtatc

SEQ ID NO: 4874 - DNA, 453 bp, Cyanidium caldarium
  Clone ID: LIB190-050-Q1-E1-G9
cccgggtcgacccacacgtccgcccacgcgtccggttcgttacttgatgcagagacaaatccccatttcagaactctcaaaggagcaattgcagatcttgtacgatagaatggaacaagaactcgaacacttgaggagcagtcttcgtactctccatacggcagttagccggttacagagaagtttgcagtgtttagattccctttctcacaaagaaaagggttctcttgtgatggttcctctaactagctcgctctatgtacctggaagtttagcagatacaaagactgtccttgtcgatattggaaccggttattatgtcaaaagctcaattgacaaggcggaagattacctcaagaagcgtttgaaaacagtaaagacggaagtagaaaaactccaacaactagtatccacgaaacaagagcaatatgaatatgtatccgtggctctacg

SEQ ID NO: 4875 - DNA, 330 bp, Cyanidium caldarium
  Clone ID: LIB190-050-Q1-E1-H10
gacccaagcgtccacccacgcgtccgcccacgcgtccgcggacgcgtgggatgtaaaatagttgacaagggtttattgcaaaaaggttgaatagtaactcgttctatatggttcgttgagtattgtctagagacaagtgggacaattagtatccacctttatcttcgcatatacataaatatatttatttatttaaaaaaaaaaaaataaaaaaaaaaaaaaaaaaagaaataaaaaaaaaaaaaaaaaaaagaagaaaaaaacggggggacgcccaaaaggttcaagctttagatgtcagtactggcgacttatgggcactttaaaagg

SEQ ID NO: 4876 - DNA, 428 bp, Cyanidium caldarium
  Clone ID: LIB190-051-Q1-E1-A10
aatacccgggccgacccacgcgtcaacggacgcgtgggcgacaacgaatgaagtcagcacagccttaccaaacaactagccaaggatatgaagaaggaattcattggagtagaagaatatttcatacaaggaatggaatattggctctcctgctttatcatagagataaagtgttgtttcaaaaagtcgttggatatttattagtattgttgatatgtttggagtgtattcggttgcatagtagttggctgaatgagttggcaagtcgcttattttatcccattatgagaaagaacgagactagacgtttcagtggaatgggttattatcttgcgggagtcttgtatgcttcttgttattttgactcggttgtttttgatttggttgttattcatttggctattggtgatcctattgctgccattttt

SEQ ID NO: 4877 - DNA, 358 bp, Cyanidium caldarium
  unsure at all n locations
  Clone ID: LIB190-051-Q1-E1-A11
acccacgcgtcagcccacgcgtccgcccacgcgtccgtctcattgttgttgttattgaggaacacggaggacgacagtagcgatgggattgtttagtagactgtttgtgaaaccgagtcgtgtaccgcaaagagtcgtagagtttcaaaagcgcaaggcggaaggctactttacatacaacgccgggaagtacgaccgatacatcaacacacctatttacctgtttgtgtccttcaccggtctttatgcctttattgacggttgtctttgggcggcaggaaagaaggaaagtcaatcgtgaatagcgtnttttgtccttgtggacagtcttatgaactagtgattcgtttgttctgcc

SEQ ID NO: 4878 - DNA, 437 bp, Cyanidium caldarium
  Clone ID: LIB190-051-Q1-E1-A12
ggtaccggtcaggaattcccgggccgacccacgcgtcagccttttcggaggtaatatgtcgtacaacgaactggtaaagtggcagcattcacaaaggagaaagcagcaagttgattagagcatctatacatatatatcgttaccgacagggatcgggagagagagaaattttacagtctgtgcatttttcggtgaacaaatgtggatattttcgtttccattcttcaagttgtcgacatcgccatctatccgagttgtaaaacagagacggatcgaaataacggtatcctgcaatccattctggaggtatacgttggagacaaagctgccgcatttcattgactcggaacactttacctctcacctgtcgagattcattagaaattcttcccaacccatcataccacaataattttcgttccagattgtccaacgag

SEQ ID NO: 4879 - DNA, 443 bp, Cyanidium caldarium
  Clone ID: LIB190-051-Q1-E1-A3
ccggctcgacccacgcgtacgggactataattatttgggattgtgttgcggtggccaattatgagaatacgtcgtttgaacgaacaaggagaagaagaagacaaagaagacgaacaagaagaaatgcaaagtgaagagttgacaaggagttgttcggaatttcttctttcgtattcttccgaaatggtagactgtataacctcattgagcgatgacgacgaagagaaagagtcgttcgtggcttctcgacttggacaaaaactgggaaagatgctggaaagttatgcctcgcattgtagtggaaaaaataagactttgttgtttcgtcatgttccggacgacacaccaacgaagcattggcttatcgacaagttcaagtttacaacgagaaacttacgggttaccttgtcacctggagtccgtcgaagaaggaagaataagag

SEQ ID NO: 4880 - DNA, 423 bp, Cyanidium caldarium
  unsure at all n locations
  Clone ID: LIB190-051-Q1-E1-A9
gtaccggtcagcaattcncgggctgacccacgcgtcagcggacgcgtgggcgcggacatagaatggcaacagataaagtcagctaagaagatatactcttatgtaaaagaatcaaaaactaaagaatatttggagctagacgattcgttgcagcagccagtggattcatcttgtagcaccaagtggctgtttattgcaaccccactgttggaagttgcttgtactgatgggcagcgaattgaaatgattcctttgaagaaagatataaaggaattgtttttctctactttaaagaagaactttgagtcgaacgaagcgtcatgggagtgcagtgtagttgaaaccgcagttgctgtttttatccagtattatgaacagtgtgtggaacagtactatctagcaagcacagattatgagctacct

SEQ ID NO: 4881 - DNA, 396 bp, Cyanidium caldarium
  unsure at all n locations
  Clone ID: LIB190-051-Q1-E1-B1
aattcccggctcgacccacgcgtacgcccacgcgtccgcgatttgggaaattgcaaataggccaaagtgtgttgttgtagtgtacgagggttggtcatttgttgagctgaagagtcaatgaacaagcttcagttgctatacgtaaccaaacaagctgtttcaaaagcatggcaaagagaacagaaaaggttatactccgagaagaaatcagttgcagaaggaactttgggaagcaggtggaaggaaagagaaactgcacaagagagcgcgtactttaatcgtgaagatgagcaggcagtacaaaggttagcagcgaaacttcggcagcaaattgagccatcggaggaagtactcgcccaacaaagaaaaggcgtggcaganatcttacaaaaacac

SEQ ID NO: 4882 - DNA, 370 bp, Cyanidium caldarium
  unsure at all n locations
  Clone ID: LIB190-051-Q1-E1-B11
acccacgcgtcagcccacgcgtccgcccacgcgtccgttccgattccggcaaaggaggagccttttccaaactaggcatagtatggatagaggatangagagagggatgggtatcgagttggggatcgtagtagatggcaaatgtgtgtggagtattgttttatcacgataaacactgtcttcactaaaaaaaaaaaacaaaaaataaatcaaaagaaataaaaaaaaaaacaaaaaaaaaaaaaacaaaaaaaaaaataaatgaaaaaaacaaaaaaaacattcaaaattaaaagaaaaaaaaaaaggggggccccccaaaaggattcaaccttacttacccgtgcatgcaaattcaaagccctccaaa

SEQ ID NO: 4883 - DNA, 373 bp, Cyanidium caldarium
  Clone ID: LIB190-051-Q1-E1-B12
taccggtcacgaattaccgggctgacccacgcgtcaacccacgcgtccgcccacgcgtccggaagtaaatagacgtttgaaaggcgtccagtatgaaaggagaaacgagtgtagcactgtctagtcgtccaactcagcgaaacagcaataactgtgaaaatgcattaaactaccattaggacggaaaaaccccataatcctggacaaaataggttaaggaaggaaaaaaaaccataaattaaagaagttggggtaaaaaataaagaacaatgccataagaataaggaatctaactgattaaggaaaataagcttaacctagtttggctggggaattaaagcctaagaaggagtaaattaggcaaccaaaggca

SEQ ID NO: 4884 - DNA, 376 bp, Cyanidium caldarium
  Clone ID: LIB190-051-Q1-E1-C1
ggtaccggttaggaattccctgctcgacccacgcgtacgttttttttttttaacacaactattctttattttcgcaaaccttgtgccttcactcgaaaaatgtgtcttcctttgcaaaaatcggcatacttttgcgtcgataataatgcgcaaacgaaagactagcggcaagagctaaaacaggggcaccaacagtcagtgatggacaaacctcaagtggatcattccacgttggtaaagatagacttgtctcaaggcagctttaatgtactccaagactgtgacaaagatttagaatgtgatcataatgccaagtttcagttggaacttatgcagtacggtctcttttcacctggctgtcggacgatagaaaatg

SEQ ID NO: 4885 - DNA, 207 bp, Cyanidium caldarium
  unsure at all n locations
  Clone ID: LIB190-051-Q1-E1-C10
ggtcaggaattcccgggccgacccacgcgtcagggctcccgacgtcttttccctggatgcagatagcanagtgactagaaatactacgacggaagaaacggaaacacatcctttgcaagtgcctcgtagggaacctanaggaaaggtaaganagagagctctatggtgaggtttaataaatagcatagcacctacaaaacgatgttg

SEQ ID NO: 4886 - DNA, 294 bp, Cyanidium caldarium
  Clone ID: LIB190-051-Q1-E1-C11
acccacgcgtcagagagaataaggagaggatagaaagaatgtcgggctggtttgttttgtacactttcgttgtattttaacaatatgtaaacaaaacctgtacgttttgtagatataactggttatgactcaatgttagtcatagctgagtgaaaatatatttaaaactacaacatttttgttcttgtttaaaatagagtcaaaacaataaaagtggccgtgtactcacttgcctccacatatctacaactaaaacaagcctctcgtcctcacacgcatccctatgaaaaaggg

SEQ ID NO: 4887 - DNA, 197 bp, Cyanidium caldarium
  Clone ID: LIB190-051-Q1-E1-C12
taccggtcaggaattcccgggccgacccacgcgtcagggcattaaagttggtaggcaacgatggatatgttctaacagaagctggttttggtgcagacattggtttggagaaattcgtgaatattaagtgccgtgcttctggtttagttcccaattgtgctgttattgtggctacaattcgagctttgaaaatgcat

SEQ ID NO: 4888 - DNA, 108 bp, Cyanidium caldarium
  Clone ID: LIB190-051-Q1-E1-C8
ggtacggtatggaattcccggctcgacccacgcgtacggagaataataatttgcacgcaaggcgcgcggactcgaccgtgttgggtgtaattgtggtctcagtaacgt

SEQ ID NO: 4889 - DNA, 346 bp, Cyanidium caldarium
  Clone ID: LIB190-051-Q1-E1-D12
ggtaccggtcaggaattcccgggccgacccacgcgtcagcccacgcgtccgcccacgcgtccgcccacgcgtccgcccacgcgtccgcccacgcgtccgcccacgcgtccgcccacgcgtccgcccacgcgtccgcttgcatttggtgaaaagacaaagaacttggttattctcatattcggtttagtaggtatgctgatcggaacttatgtttccattatggaaatgcagaaaaatccggagtattgaattgatatggcattgttctcctctttctcttgttgtacaagtttacaacaaaaagcccggctttgggttttatacttttcatgtaaattttcctttc

SEQ ID NO: 4890 - DNA, 66 bp, Cyanidium caldarium
  Clone ID: LIB190-051-Q1-E1-D2
tgcctggtccaacttttcggttctatcctcacactctgtacagggtcgacccgtgcgtggaaagcc

SEQ ID NO: 4891 - DNA, 237 bp, Cyanidium caldarium
  Clone ID: LIB190-051-Q1-E1-D6
cgacccacgcgtacgcccacgcgtccgcttttttttattgaaacacaagactttacgagtagtgaataggcgttttacttgttttgtttatagagttgaacgaaactttgaaagattccgtagcttgtcatgtctgttatttgctcacctcggagcttgacagagagtttcttggttcgactccaaatagtaagcttaagagactgttttgtcacactccagcatggtgggatccct

SEQ ID NO: 4892 - DNA, 399 bp, Cyanidium caldarium
  Clone ID: LIB190-051-Q1-E1-E10
gggccgacccacgcgtcagcgatctttggctttatcgtcgagtcctgaatacgagcatattccagaagaagaacgaaaaaaggttttggacaaggttcaagaggcagaaaattggctgtctcaacaaattcccatatttgagaaactgcaaaaacatgaagattgtccagttagtgtagcacaaattcgtcagaagagtaaggcagttgaacagttttgtcaaccgattatgaatcgtcccaaacctgctccccctaagaagaacaaggaggaagagtcagcttcttctaccaccaacaaggataatagtacgacaacaacccaaaaagaggattcttctgagcagatgcagacagaaacagaggacgacaagagtgcggaaaacaaagattccccaat

SEQ ID NO: 4893 - DNA, 415 bp, Cyanidium caldarium
  Clone ID: LIB190-051-Q1-E1-E12
taccggtcaggaattcccgggccgacccacgcgtcagcccacgcgtccgcgcagcgattccatgttgaaagagggtacacgtatattgtccgatctcaagtttcaggtgcttcaagatggaaaacctcaggtgataacttcggatcaagtattcggaggaaagaaagtagtattgtttgggttacctggtgcctttactccaacctgctctaggcagcaccttccaggctttggacagaaggttgatgaaatcaaatcgaaaggagtagatacagtcgcttgtttagctgtcaatgacccttttgtattacatcagtgggcagagtcacagggagtggcaggaaaaattctcatgttagcagatggtggtgcgcaatctgtcaagaaacttggactggatatcgatactggtgac

SEQ ID NO: 4894 - DNA, 314 bp, Cyanidium caldarium
  Clone ID: LIB190-051-Q1-E1-E3
cacgcgtaagctacaagcaatttccatctttttccctcagtcattcttacatttcagtagatgtacaagatttttttcaatgtcaaaaaatattgcacaatccacccatcgaagcacgaaaaaaaaagcctttcgactctttctttctatacttttgcaatgagaagaaaatgatacatagaatcatcggcaacggattggatgctggtttagaggcgttcaaccatagtccaacaaacgtagcgtcgtaccatggcctatcggccatatgaaagaccagaggtttgactccagcagttccatcgcgtactttg

SEQ ID NO: 4895 - DNA, 381 bp, Cyanidium caldarium
  Clone ID: LIB190-051-Q1-E1-E6
ggtaacggttaggaattcccggccttgcctatcgacaaccatcggagctcgtgattcatctgctgctgcttcctgaagaagagattgcttcgacgcaagatgtccaacaacatcaacgcctttatcaatccactcttctcttgtcacaaggtatcctttcaagacgccaagaaaagtatttgttggcagaagaagaaatccaggccagtcaacccgaatagtctcgttatccagtcggttgcctctccaccagtcaaagcaaacaaactctttcaaatatcttgtgcactgacctcggcatttgcatattcatcccattgccttgctacagaaggcactggagaacctttgggtgtcgatgaccctcctgtgttggtcgtg

SEQ ID NO: 4896 - DNA, 337 bp, Cyanidium caldarium
  Clone ID: LIB190-051-Q1-E1-F11
gtctgtaattctcacgtgcggttacaaacgattttgcatttctttgttggtgtgcattccatcgcaaaaaggtatgtgtagagtcatcgaagtctccatctaagacaaactcgggagcctctctatcgtctaatagtcgtttttgcgacaggactagacatccgtgcactcaggattcagccactaattttaactatcaggaacacgctggttcacaccacatagtagttgagagtgtgtcttcaactagggtttgtcctgattgtcgtatagctagattgacgacttcacatagtttcttgtcctcaatatgtatttttgatacacgttacatatc

SEQ ID NO: 4897 - DNA, 364 bp, Cyanidium caldarium
  Clone ID: LIB190-051-Q1-E1-F3
gaatgcatgcgcttattgtctatgatgacttgtcaaaacaagcagttgcctaccgtcaaatgtctttgttgcttagacgaccaccaggacgtgaagcctatcctggagatgtcttttacttgcactctcgtctgttggaaagagctgccaaaatgtcagatgctcacggtgctggttctttgaccgctttgcctattattgaaacccaagctggagatgtgtctgcctatattccaacgaatgtgattagtataaccgatggacaaatctttttggagtcagaactgttttataaaggccagagacctgccatcaatgttggactttctgtttccagagttggttctgcagctcaaccgaaatg

SEQ ID NO: 4898 - DNA, 369 bp, Cyanidium caldarium
  Clone ID: LIB190-051-Q1-E1-F5
ggtcaggaattcccggctcgacccacgcgtacgcggcattcgacgacgccttcgagctggagcagcgttgagtaatttctgaaacacaaatatgcgtgccaagtggaaaaagaagagaacacgacggttgaagcgcaagagaagaaagatgagacagcgttccaagtaacggaagaatcctcggacgtctgagttgaatagagttcctaaaacgtgggaaaactctatttgcaactctggcgcagtgattatatcctgctacggaaggttggaagtgtttccgaggattgttcgcaagttatgataaaaggttcttgtggtttttgttttcaacttgtaaatgccacttgtcagtcattttattcgagt

SEQ ID NO: 4899 - DNA, 362 bp, Cyanidium caldarium
  Clone ID: LIB190-051-Q1-E1-F6
cgacccacgcgtacgcgaaaagagtagcgaaacaagagaagggaagtaaaaggtaagaaagaggaaaggtttacgagagaaggaagtagaaagaagagagtgtaaggcggcgtcataatagaaatccgaaaggagtagaagaaaagagagagaagaaagaaaagaagagaaaagccgtactgaagaccgacacaggtactcgaggagaaaggagacccaaattaaggtgagagaatggacgataaggaactaggcaaaaggatatggtatctgcggtagaacatatgaaagaagcagcaccgactgtttagcaaaaacacagcactctgcagaaaagagaaaatgtacagtaaagagtgtgc

SEQ ID NO: 4900 - DNA, 350 bp, Cyanidium caldarium
  Clone ID: LIB190-051-Q1-E1-G10
ccacgcgtcagcggaagcgtgggcggacgcgtggggaaataaagaaactgcacaagagagcgcgtactttaatcgtgaagatgagcaggcagtacaaaggttagcagcgaaacttcggcagcaaattgagccatcggaggaagtactcgcccaacaaagaaaaggcgtggcagaaatcttacaaaaacacggtgtccagcctaatcaaagtttgattgaagatattgtccgtttctttcaataatccctccgtgtttgatgtttagctgcggttcaactagagttttgtttgggaacacgttggatccagtaaagaacaaaagaacttctttgtaaaaaaacaaacaaaa

SEQ ID NO: 4901 - DNA, 454 bp, Cyanidium caldarium
  Clone ID: LIB190-051-Q1-E1-G11
gtctagaattaccgggccgacgcacgcgtccacccacgcgtccgctttgggaacattgttattggttggtgaaagtttatagaaaatgacaaaaggaacttcgagttttggtaagagaaataacaaaactcacgttttatgtatacgctgtgggcgaagggcgtaccatctacagaagaagcgttgtgcttcttgtgggtacccatctgctaaaaagagaaaattcaactggtcggaaaagtcgaaaagaaggcgaacgacaggcactggtcgaatgcggtatttgagacacctaccgcgacgattcaaaaatggttttagagaaggtgtcaaggcttcttctaaacgtcctgctccagcaccttcagcagtataataattgacaacttttgtcaaaatataaactcgcgcccagttcaaacagatgagacaataaagcctttcccttgggttc

SEQ ID NO: 4902 - DNA, 421 bp, Cyanidium caldarium
  Clone ID: LIB190-051-Q1-E1-G6
cggctcgacccacgcgtacggtgtgctttgctggtcaagccattccaaggactcgccaagcctttgcagaaatacactgctctccgcaagtggtttggagtgtataaatatgattgtcacagaaagaacctcctttcgacatgcctctcccgagttaatagaaggatggttactaaaggaagggaagctttttagaaccaaagacaagagatatctgcgaatagccaacggcaccctttccaaccacaaagcggagaatgaaccagcaacttgggatttggatctaacagagtgtaaagtgagagaaggtcccagaaaatatgaaatacgcctcgagctacctaacagagtcgtttccttttttgcagacgaatgacgagaccacactagatgggttacgggtttttaaacgagcaggttt

SEQ ID NO: 4903 - DNA, 378 bp, Cyanidium caldarium
  Clone ID: LIB190-051-Q1-E1-G8
ggtaccggttaggaattccctgctcgacccacgcgtacgaatgcaccagctcatgtggagaatgtcgttgaacctagcaaccacttttcttatccaagtttctatccagagaatatgccatttcccacaggatatcctcctcctcctatgacttcaggagtatggccatatccgtattttccatttccgtatttcggacaatcctttgcgcctataaataatgactatagcaccaacaataatattccctggaaagattcatctgtcgtcagtgcatcgaaaccaaacttggtggagaaaccgaaagtcaatgaaagttctatgaagagaaagcatcatggatgagaggatgataggaccgggcgttcttcatcctcg

SEQ ID NO: 4904 - DNA, 416 bp, Cyanidium caldarium
  Clone ID: LIB190-051-Q1-E1-G9
ggtcaggaattaccgggccgacccacgcgtcaggttgggggtggttcgtggatgacctttctactcatacttgcctttgttgcgggttattttttgggcgaacgaggcaaaaagaagaaaagtccgaaatatagttgggtaccgcctaccttaaaccacctttcagagtttccagcgaattcgaacaacagtcgtggtacagttagaacttgtaaagaagagtgtaaattggtactttgtgttcgttccgatttgaagatgggaaagggtaaaatagctgcacagtgtggacacgcaacactcggtgcctatcaagatacacttcggaccaaccctggttatttatggaagtgggaagcagatggtcagccaaagattgcactttcagtatcttctcttcaagaaatgaaaaattt

SEQ ID NO: 4905 - DNA, 289 bp, Cyanidium caldarium
  Clone ID: LIB190-051-Q1-E1-H11
cacgcgtcaggtcgtatccagtcgcttgaactcgtatggttgaacctactgaaagtcaatctcacgcaaagttggatcgtatttgtgatcccgtgttgagtagaatagaatatcttcgggatactgacaataggaagatggagatcgaaaggaaaccgatcaagtcgctaccacagattgcaaatgtggaatcaacagagtaattggttccatccctcatcacgtctctcggctgcataccgagcaattgggttccacactataaaaatccggcccaccgtaacgtaga

SEQ ID NO: 4906 - DNA, 286 bp, Cyanidium caldarium
  Clone ID: LIB190-051-Q1-E1-H2
tcaggaattaccgggtcgagccacgcgtccgattgaaaatcatggtagacaccaatcttaatgacggtgctagtgctgctctttggacttgccgcccagttctctagacaattgtgtcagcattttcagcaacaataattggacctgatggaacgaaagcagataacatatggaacgatgccctatattatcatggaaaagtggtgaacttttgtgcagattcggcgtcatcagtttttgaaagtggcgatcatggagcatgtcaacatgtgatggcatttgcttc

SEQ ID NO: 4907 - DNA, 293 bp, Cyanidium caldarium
  Clone ID: LIB190-051-Q1-E1-H5
cccacgcgtccgtgtgtgtttgtgaaattaaaagcttgccgtgttaaaaaaaaaaaaaaaaaaaaaaaaaaaaaaaaaaaaaaaaaaaaaaaaaaaaaaaaagaaccacaaaaaaacaaaaaaagggcagccgcccacgaggatccaaccttcgatccgcttgcaagcgaagtccgggccctcccagtgtgtcccctaacttcgtttaactggccgtctttttccaacctcttgactggaaaatccctgccgtcagccaatttagccacgttgcccgacatccccctttcccc

SEQ ID NO: 4908 - DNA, 356 bp, Cyanidium caldarium
  Clone ID: LIB190-051-Q1-E1-H6
aattcccggctcgacccacgcgtacgtagctccaaggtacacgaaagggttgctcagctctgttccccagggagaagccaagtatttatcacagagaataggttattacttgtttgttttacaagtgaaacgagaaagggtctcttctaggagtatgcgcatagatggacttggtggttacctcaaaactgaaaggcgaaaacggcagaaatcccagggtagacggtaacaaccttccaatagaaacatcggaaagagatgaagagactacagaagaagttgtttcttcattctgggactggcacattttccgtagaatcttaaacttgggaagttgactgttacggtcgcatgtg

SEQ ID NO: 4909 - DNA, 421 bp, Cyanidium caldarium
  Clone ID: LIB190-051-Q1-E2-A12
aattaccggctcgagccacgcgtcagccttatcggaggtaatatgtcgtacaacgaactggtaaagtggcagcattcacaaaggagaaagcagcaagttgattagagcatctatacatatatatcgttaccgacagggatcgggagagagagaaattttacagtctgtgcatttttcggtgaacaaatgtggatattttcgtttccattcttcaagttgtcgacatcgccatctatccgagttgtaaaacagagacggatcgaaataacggtatcctgcaatccattctggaggtatacgttggagacaaagctgccgcatttcattgactcggaacactttacctctcacctgtcgagattcattagaaattcttcccaacccatcataccacaataattttcgttccagattgtccaac

SEQ ID NO: 4910 - DNA, 189 bp, Cyanidium caldarium
  Clone ID: LIB190-051-Q1-E2-A3
acgccgccagtacggtcaggaattcacgggtcgagcgcacgcgtcaggcaaaaaacctcacatggagttatgactcgtttgttactgcagtctggagcaggaattattccttcaacacttttcgtagtaattgtgttttggtgtagttttttttgttataataagaataaagaaagtccagagttgttg

SEQ ID NO: 4911 - DNA, 450 bp, Cyanidium caldarium
  Clone ID: LIB190-051-Q1-E2-A6
acgcgtccaggtaccggtcaggaattcccgggccgacccacgcgtcagcccaagcatccgtccacgcgtccgcgcatgcgtccgcacacgcgtccggacacaatatatcaaaagttttagattggatgaatgctgatgaaatgttatcgagaggctttaaagaacatatttatgaggttttccaatataggcctgcacactgtcaaattggacttttctccgccattatgctgcaagatgtacgagaaatgacggagaagtttatgagagatccagttgtgattttggtgaagaaagatgaacttacactggaacgtatcacacaatactatataccactggaaatcgacgagtacaagtttgatactttacgtgacctctacgaaactttgactgttacgcaggctataacttacgtgactacacggaggaaagttgactggctcacac

SEQ ID NO: 4912 - DNA, 377 bp, Cyanidium caldarium
  Clone ID: LIB190-051-Q1-E2-A8
cccgggccgacccacgcgtcaggaggtgtatgatgcaagcaaagaagtgacgcagtagatcagagagtaacacatgcaagtaggtaaagcgaacgggtgagtaaagaggtgtgaaagagtggaagagcatgaaagcacagaagaatgtaagaaatggtagagtaaaaaccatacaggaagtaaaagcgggaatctgagaggaggaaagccacattgggactgagaaaaggtccatacaagagaagtcagcagtggggaaaattgggcaatgtacagggaagtatgacccagtaatgaggagtggaataaacagaagaggaagtaagaggagggaatgaagggaagttatggcaaaaacacctgccagcagcagcggt

SEQ ID NO: 4913 - DNA, 128 bp, Cyanidium caldarium
  Clone ID: LIB190-051-Q1-E2-B1
ggtcaggaataccgggtcgagccacgcgtccgcccacgcgtccgaatgggcatagatgtcatggcaaccaaggaaggtttcatacaacacagtcactctacaaaagacagcctccaattgcaactttg

SEQ ID NO: 4914 - DNA, 356 bp, Cyanidium caldarium
  Clone ID: LIB190-051-Q1-E2-B10
gccacgcgtcagcccaagcgtccgtctcagcccaagtagtagaagaatatgttggcgtttacatgtctcacagactgtcgttggttagagacttctcgattctccagatgtgcgaaagccaatgaggtctcgttgcgacgtagttcccagtgtgcacactcttggaggagtgtttcgatgaagtagagtccctattcgataactaccgacacatcagaaggacatattgttcccggtactttttcaagatttgagtttcttgactgtcgagtcaacggtccaaccgtcttgaagcctagcatacttgactttacagtgtcgaatgtatcagatgctgcctttggagaatggagagc

SEQ ID NO: 4915 - DNA, 369 bp, Cyanidium caldarium
  Clone ID: LIB190-051-Q1-E2-B2
ggtcaggaataccgggccgagccacgcgtccgcccaagcgtccgcccacgcgtccgatacgggaaagcagtaaaagaagaaagagaaaggaaaaaactgagtatcaggaagaaaagagggagtagatgaggaaagaaagatcaaggaagtaagagtaagagaaggagtaatgtgaatgaaagcaggaaagtatttgaagaagagagtgtaaagcgcgtaccttttgcataatgtcccagcgagtgaaagaggaagcaaaaagaaagaaaaagaagtagccaggtaagacccgaagctagttgatcttatgctgtccaagccaagtaaggcgtaaccagtatccgtggaaaaagatctggaagagatggc

SEQ ID NO: 4916 - DNA, 110 bp, Cyanidium caldarium
  Clone ID: LIB190-051-Q1-E2-B8
gaagtcccgggcagacccacacgtcagtactcacttgttaacacaactagtcttaattatcgcaagacctgtgccttcagacgaaagatgtgtcttcctttgcaaaaatc

SEQ ID NO: 4917 - DNA, 401 bp, Cyanidium caldarium
  Clone ID: LIB190-051-Q1-E2-C12
cgcgtcagggcaataaagttggtaggcaacgatggatatgttctaacagaagctggttttggtgcagacattggtttggagaaattcgtgaatattaagtgccgtgcttctggtttagttcccaattgtgctgttattgtggctacaagtcgagctttgaaaatgcatggcggtggtcctcaagtatctgctgggacaccacttcctcatgaatacactcaagaaaatttgcaactggtagaaaatggaatgtgcaacttaagaagacatattgccaatacgagagcttttggtatacctgtggttgtagctttgaacaagttccagtacgatgcagacccagaaatacagctcgtaatacacatatgtaaggaagcacgtgcctttgatgcagttttggc

SEQ ID NO: 4918 - DNA, 315 bp, Cyanidium caldarium
  Clone ID: LIB190-051-Q1-E2-D6
ggtatcggtcaggaagtccgggccgacccacacgtcaggccaagcatcagcttttatttagagatccactagtatttacgagtgatgcagtagcatctcactagtatatgcctacacagcgtttgtgaactgaggagaagtatgtgagaaaagacgagagatatctgcatgcaagaggagatcaaatttcctgtaatggaatatcattgagggtgagaatcccgtttacctcttttccttgtatggagactgcgttacgaaatgtcctgttctgtagtctggttgtttggtagtacagccttaattttgtgggtg

SEQ ID NO: 4919 - DNA, 402 bp, Cyanidium caldarium
  Clone ID: LIB190-051-Q1-E2-E12
cacgcgtcagcccaagcgtccgcgcagcgattccatgttgaaagagggtacacgtatattgtccgatctcaagtttcaggtgcttcaagatggaaaacctcaggtgataacttcggatcaagtattcggaggaaagaaagtagtattgtttgggttacctggtgcctttactccaacctgctctaggcagcaccttccaggctttggacagaaggttgatgaaatcaaatcgaaaggagtagatacagtcgcttgtttagctgtcaatgacccttttgtattacatcagtgggcagagtcacagggagtggcaggaaaaattctcatgttagcagatggtggtgcgcaatctgtcaagaaacttggactggatatcgatactggtgactttggtggtattcg

SEQ ID NO: 4920 - DNA, 231 bp, Cyanidium caldarium
  Clone ID: LIB190-051-Q1-E2-E6
ccgggccgacccacacgtcagcccacgcgtccgcgcagcgattccatgttcaaagacggtacacgtatagtgtccgatctcaagtttcaggtgcttcacgatggaaaacctcacgtgataacttcggatgaggtatgcggaggaaagaaagtaggggtgtttgcgttacctggtgcctttactccaacctgcgtcaggcagcaccttccacgctttcggcagaaggttgat

SEQ ID NO: 4921 - DNA, 444 bp, Cyanidium caldarium
  Clone ID: LIB190-051-Q1-E2-E7
aattcccgggccgacccacgcgtcagcccacgcgtccgcccacgcgtccgggaagcagaagtattcgtagcaaagttgggtagctgggcgacagtcatcaaactgttctatcagacagtgaaatgctttcctaatcaagtgggaaactaccaattacttgttcagcacgagtgaggataacttgaacaaatcctcatatggaatgtgacacaacgtatctcaactaagaaacaatgtgaaatatatccaacaacgtcactttttattattgagacaaacttgatggcggagcacaaaacaaccacaaaactattgcgtctgcattctatatcctcgcagttgaaatagaaattcgaagcctatttggagagtggccagttgaagtcatctgttgaagaaaccctttctctgtcaaacccaaaaacgcccaatatatgttgtttt

SEQ ID NO: 4922 - DNA, 406 bp, Cyanidium caldarium
  Clone ID: LIB190-051-Q1-E2-F10
acgcgtcaggaaacgctgtacgcaaaaaattgaacaacactacagatagcgatattgcgtctgatatgactggacatatatctgatagtattgtttatcactcaggaggagatgtctcttctgatcaaaattccgtgggttctcgagaagatagtataccggagagttaccactcaactcgtcgtcgtgattatattgattggaatactttgaaaaatcactttcaccttccgatgaatgaagcttcagccaaactgggtgtatgtgtgacggtattgaagaaaatatgtcgtcgtttcggaatatcgcgatggccacaccgcaaattgaaatctgtagctagacacattgaaagacaagaacgagctttttctgtagcaccaggggtagaaaacctgtcttatga

SEQ ID NO: 4923 - DNA, 176 bp, Cyanidium caldarium
  Clone ID: LIB190-051-Q1-E2-F11
gtctgtaattttcacgtgcggttacaaacgattttgcatatctttgttggttgcattccatcgcaaaaatgcattaataaagtcatccaattctccatctaagacaaactcgggagactctctatggtctaatagtcgtttatgcgacaggactagacatccttgcactcaggatt

SEQ ID NO: 4924 - DNA, 408 bp, Cyanidium caldarium
  Clone ID: LIB190-051-Q1-E2-F3
ggtctagaatatccgggtcggcccacgcgtcaggaatgcatgcgcttattgtctatgatgacttgtcaaaacaagcagttgcctaccgtcaaatgtctttgttgcttagacgaccaccaggacgtgaagcctatcctggagatgtcttttacttgcactctcgtctgttggaaagagctgccaaaatgtcagatgctcacggtgctggttctttgaccgctttgcctattattgaaacccaagctggagatgtgtctgcctatattccaacgaatgtgattagtataaccgatggacaaatctttttggagtcagaactgttttataaaggccagagacctgccatcaatgttggactttctgtttccagagttggttctgcagctcaaccgaaatgtttgaagcaag

SEQ ID NO: 4925 - DNA, 385 bp, Cyanidium caldarium
  Clone ID: LIB190-051-Q1-E2-F4
cgcgtcaggattgcatgcgcctagtgtctatgatgacttgtcaagacacgcagttggctaccgtcaaatgtctttgttgcttagacgaccaccaggacgtgaagcctatcctggagatgtcttttacgtgcactctcgtctgttggaaagagctgccaaaatgtcagatgctcacggtgctggttctttgaccgctttgcctattattgaaacccaagctggagatgtgtctgcctatattccaacgaatgtgattagtataaccgatggacaaatctttttggagtcagaactgttttataaaggccagagacctgccatcaatgttggactttctgtttccagagttggttctgcagctcaaccgaaatgtatgaagcaagtc

SEQ ID NO: 4926 - DNA, 393 bp, Cyanidium caldarium
  Clone ID: LIB190-051-Q1-E2-F5
aggtacacggtcaggaattcccgggccgacccacgcgtcagcggcattcgacgacgccttcgagctggagcagcgttgagtaatttctgaaacacaaatatgcgtgccaagtggaaaaagaagagaacacgacggttgaagcgcaagagaagaaagatgagacagcgttccaagtaacggaagaatcctcggacgtctgagttgaatagagttcctaaaacgtgggaaaactctatttgcaactctggcgcagtgattatatcctgctacggaaggttggaagtgtttccgaggattgttcgcaagttatgataaaaggttcttgtggtttttgttttcaacttgtaaatgccacttgtcagtcattttattcgagtaaaaaaaaaaagaaaa

SEQ ID NO: 4927 - DNA, 418 bp, Cyanidium caldarium
  Clone ID: LIB190-051-Q1-E2-G1
ggtcaggaattaccgggtcgagccacgcgtccgcccaagcgtccgaaaaatgttcgtgtcttactccgtacctgcaagaaacttaccggctttggcacgtaacttttccaatgtctgtctctcgaggagtggtctgagagggggatgtttacgaaatgtgaaagttttcaaccacaaacgacctgcaaggttgttatctacgaaaatgagaggaggcgaccatgaaaggagagaacttagtcgtcctatgcgtacgcttgattccgctttcgacgaacttttagcttttgcgcaggatccctggtccatgtttcgctctccatggagtctgtcgcccagaagtatggcagtagacacgtggatgcctcgtgttgacttggtggagaaggaagatggcttttatgcatacgtggaacta

SEQ ID NO: 4928 - DNA, 403 bp, Cyanidium caldarium
  Clone ID: LIB190-051-Q1-E2-G11
cacgcgtcagcccaagcgtccgctttgggaacattgttattggttggtgaaagtttatagaaaatgacaaaaggaacttcgagttttggtaagagaagtaacaaaactcacgttttatgtatacgctgtgggcgaagggcgtaccatctacagaagaagcgttgtgcttcttgtgggtacccatctgctaaaaagagaaaattcaactggtcggaaaagtcgaaaagaatgcgaacgacaggcactggtcgaatgcggtatttgagacacctaccgcgacgattcaaaaatggttttagagaatgtgtcaaggcttcttctaaacgtcctgctccagcaccttcagcagtataataattgacaacttttgtcaaaatataaactcgcgcccagtccaaacaga

SEQ ID NO: 4929 - DNA, 390 bp, Cyanidium caldarium
  Clone ID: LIB190-051-Q1-E2-G5
attcccgggctgacccacgcgtcagcggacgcgtgggatgttaatgttgcagtatacgagagagaagagtgtaagggtagaggaaatgaatataatggaaggagaatggtaatgtatggagtaataggagtaatgataatgatgacgttaagagggaagggagtaatgggagtacatgtaggaatgtcatggttagggataagtagtgtaataataatgggaataatgggaatgataaatgtggtaagtacgtcatataaaagcatggagtatatggaaaggtttacgagagaaggaagtagaaagaagagagtgtaaggcggcgtcataatagaaatccgaaaggagtagaacacaagagagagaagaccgaaaagaagagaaaagccg

SEQ ID NO: 4930 - DNA, 405 bp, Cyanidium caldarium
  Clone ID: LIB190-051-Q1-E2-G8
attccgggccgacccacgcgtcagaatgcaccagctcatgtggagaatgtcgttgaacctagcaaccacttttcttatccaagtttctatccagagaatatgccatttcccacaggatatcctcctcctcctatgacttcaggagtatggccatatccgtattttccatttccgtatttcggacaatcctttgcgcctataaataatgactatagcaccaacaataatattccctggaaagattcatctgtcgtcagtgcatcgaaaccaaacttggtggagaaaccgaaagtcaatgaaagttctatgaagagaaagcatcatggaggagaggatgataggacggcgcgttcttcatctccggaacaaaccgctgagtttcgtcggagacattcttcgaaacgt

SEQ ID NO: 4931 - DNA, 339 bp, Cyanidium caldarium
  Clone ID: LIB190-051-Q1-E2-H5
acccacgcgtcagcccacgcgtccgtgtgtgtttgtgaaattaaaagcttgccgtgttaaaacaaacaacagaaaaaaataaaaataatagaaaaaaatctaaaaaacgagaatgttgccacaggtttttcaaaaacggcgttaggactatatctgtacagtgtttccatcaactgcatcacgaagcctgggtcttctatgacatcaagtgaacatgcttgtcttgcaaactgtatggatcgctatttagatgcaatgggaatcgtttccaagactttaatagagacaacttcacgtaattccaactagtttgtgtatgatccgaagatttttgacctg

SEQ ID NO: 4932 - DNA, 423 bp, Cyanidium caldarium
  Clone ID: LIB190-051-Q1-E2-H7
aattcccgggctgacccacgcgtcagcccacgcgtccgctgacgcgtcagactcgaccaaagttgcatacatagtcgtttcgatatagtcttatatggtcgcgatgtgtctgaaacttcagctctcctatatgtatagctagtggaaaaacagtttagcttccttgatggactcaggtataggtgcccagattgcttcaagtggatgcagaatggtaacgacgatggatcgatatgaaggatattggggactcgtacaaacaggctggcttgctcatgtgctatctgacactgcatgtatcaggacattttcaagtgcttctgatgctattcaaatcttccgtaaggaccataatggagttatagatgagttccatcctccatttactatcggcgacgataagagagatcatggtaggaaaat

SEQ ID NO: 4933 - DNA, 314 bp, Cyanidium caldarium
  Clone ID: LIB190-052-Q1-E1-A11
gtcaggagattcccgggtcgacccaagcgtccgcggacgcgtgggtggtagcagttgtacattcaacatcatcaaatgccaaagggaggaaagaaagattcttcaaagaaagaagccacaagtaaacctgcagcagcagatgctacaaagacgacagaaaagtctggtccggaagccaagttgaagggaactggtgcaaagaaacaataaaaagttgactatgcatgttcctgttatgttttgtgagttctgtttgatagtttccagctattcttttggtagtgaataaagagaaaattttttatatttaaaaa

SEQ ID NO: 4934 - DNA, 286 bp, Cyanidium caldarium
  Clone ID: LIB190-052-Q1-E1-A9
gtcaggagtccccgggtcgacccaagcgtccgtgtacattcaacatcatcaaatgccaaagggaggaaagaaagattcttcaaagaaagaagccacaagtaaacctgcagcagcagatgctacaaagacgacagaaaagtctggtccggaagccaagttgaagggaactggtgcaaagaaacaataaaaagttgactatgcatgtgcagtcctgttatgttttgtgagttctgtttgatagtttccagctattcttttggtagtgaataaagagaaaattttttat

SEQ ID NO: 4935 - DNA, 438 bp, Cyanidium caldarium
  Clone ID: LIB190-052-Q1-E1-B1
ggtaccgggcatggaattcccggctcgagccacgcgtcagggaagaacggaccgagttttacaagtcgatattgctggagtattcttctctgccgttttttcaggagttttgatggtaacaaagttcttttcttgagttgtttatttacggtagttagattccggccttttttgcgttcaagaggtgaattccaatagagcatttgaggaacggaagtacttattttttcattgcgggaggaaggcgttgtttcgtagctattgctgttctggccattctgtatgtaaggtggcttaaaggaaatgaaagaatgcgacttgagttgctgttgggcaaggagaagacagcaacaataacaggaacagtgaatagttagaaaggttgatgttcgtagatattcactacttttaaaaggattcttttctgctttcccaaac

SEQ ID NO: 4936 - DNA, 427 bp, Cyanidium caldarium
  Clone ID: LIB190-052-Q1-E1-B5
cccacgcgtccgcccacgcgtccgcccacgcgtccgcaatacattgcgcgtgcaagaacggcaaagacatcgcaaaaagtgaatgagatgctcggctccgtgaatacgagttctgcaggggaagcttgtggaaggatgaagtccaaaggggggggagttggaagcgagtgcggaagcaagtgcgggtatgattggctctggagatgggggggtgggacgacagtttcaggcgggggaaggaacttcggtcgatgatgaagtggcacaactaaagtcgagtatcgagtcttcttctcgacctaaatcacttccttttcagcaggatcccaatatagaagctgagttggaccgaatgaaaagagaacgagattattcttgaactgttcaaggggggcaatgaatagacagtatatatatatatatatat

SEQ ID NO: 4937 - DNA, 418 bp, Cyanidium caldarium
  Clone ID: LIB190-052-Q1-E1-B9
gtcaggagttcccgggtcgacccaagcgtccgattgaaatggcgccatggaacctatttcggattgatcctttttctttctctgtgtgtgtgtgtgtgtgtgtgtgtggattggcgccttgtcttggatgaaagtttcgcggctccgtttcttgactctggtgacgttattctttacttgccttgttttggtgacaagcaagacagacacacaagggttatttcacagggcttctgaatcaattccgttgcatgattccaacgagtccgtcagtggctcgacagaagagtctttcgagtttcaggccgaagttcaacgcctgatgaacatcatcatccattcgctgtattctaacaaagaaatattctttagagagttggtttcaaacgctgccgatgcactggaaaaattgcgtttt

SEQ ID NO: 4938 - DNA, 426 bp, Cyanidium caldarium
  unsure at all n locations
  Clone ID: LIB190-052-Q1-E1-C2
agcccacgcgtccgaaaaggatatggtatctgcggtagaacatatgaaagaagcagcaccgactgtttagcaaaaacacagcactctgcagaaaagagaaaatgtaaagtatagagtgtgcggcctgccaaatagtagagaagaggtcgatgaaagtgaaagcgagtaaaagatgaggtatagagaatggcggtcctaacggtgagggtccaaaggtagcgaggtaggtagacgtttgaaaggcgtccagtatgaaaggagaaacgagtgtagcactgtctagtcgtccaactcagcgaaacagcaataactgtgaaaatgcagtaaactagcagtaggacggaaagaccccataattcttgactagataggtttanggaggagagagaatcatgaagtagangaggtggggtaagagatgaaaga

SEQ ID NO: 4939 - DNA, 424 bp, Cyanidium caldarium
  Clone ID: LIB190-052-Q1-E1-C3
aattcccggctcgagccaggcgtccgcgactagcgaagttgcacaatttcttcccatcatttctatattcagcatgcgtacggttgtggtcactggagccggaggattcctaggaaagttgctggttgagaaactctccaaggaggagtctattgaaacaatactagcgcgtgatatgaaggagccactcgaaagcttagggaacttgcctaaaacaaagaggggagtgggagatatcaccgaggagttgcaagttaagaaagctattgaaggatatcaagtccacggggtcgtccacctcgctgctattatgtcaggtttatctgaagccgatataaccagtgcaatgaaaataaatatgatcggtgcgataaatatgatgttatccgtagcgaacgaggcaacaaatccaagatttgttttc

SEQ ID NO: 4940 - DNA, 443 bp, Cyanidium caldarium
  Clone ID: LIB190-052-Q1-E1-C5
gaattcccgggtggacccacgcgtccgcccacgcgtccgcccacgcgtccgcccacgcgtccgaatcaggtccgtcgctattcctgctgttgtttctaccggagcagggctatctgttggtgtagctgcggcagttgcaaaggcttggtctgacctggatcagggagggagtggcagggatagagcgctcttgagtttgccccaagttttcaaaagtggggggggggagggcaatcttcgcgggcgtcaaggacaaggttctattgaagcccgaggtaaagctgagagaattgcaagacaaagagcaggaggtatccgtagtgtcgaagatgacgtcgtaccagaggaacccaactttctagcaaaggttcccaaacgggagcgagatgggagagcagcttttcgtccctcagagaagtcagacccgttctccctcggagcca

SEQ ID NO: 4941 - DNA, 441 bp, Cyanidium caldarium
  Clone ID: LIB190-052-Q1-E1-C7
gaattcgcgggtcgacccacgcgtacgcatcatgaaagctgctgtctttgcattctttgtcttagcactatgcgccgttgctattcaagcttctcctctagaggacactttgggtgcctttatgcggggtggttatcaatcgcaaagccaagcaccaaaacctagctgttgcaagttgagctgtcattatacccaaatttgtgaacaagttatcgtggaggactgggcaggtcgtccaagctgcgagaagtttaccaaacacaacaagtacagcaaacacaacaagtttcgtcagcatacggacgcaatgaggtatccagagggggatatggccaacagtctgtagccccagctcctgcaccttccgtgtcagtgttccagtcaagtgctgtattgagtgctcgtcttgctaccaacaagtttctcagcaagctcctcaac

SEQ ID NO: 4942 - DNA, 430 bp, Cyanidium caldarium
  Clone ID: LIB190-052-Q1-E1-D1
aattcacggctcgacccacgcgtacggttgtaattgtatacaaacgttatcgtagtatgctgggtctcaaaaagtctttgtatcctgctgcgacgactcgttcaactttcgcaaggcaaactattttctgggcgcttcgagttagttggtatttgatggttttcagagggacgagaattggaagtttgatcaaccgcttttatcagttgacgcatcagggagaggcaggctttggtctcatggtgctgcatgcagttactcagagtttgcaaggttttctatttggacttatttatatttaccacgaaagagcactaggggaagttgttctattcattcgtcgcaagtggagtcgcagaggggattttcgcgaggattcttttatcgcattagagaaaagaggacttgctcatttttcacaatttgatga

SEQ ID NO: 4943 - DNA, 430 bp, Cyanidium caldarium
  Clone ID: LIB190-052-Q1-E1-D2
aattcccgggtcgacccacgcgtacgcttttgtagtgttgaaaggttttccgtgcaaagtggtagacatatccacctcaaagacagggaagcatggccacgcaaaagccaacatagtaggtagtgatatcttcactggcaagaaataggaggaaatgtgtcccacctcggagaagagtctgcagccggtggttaaccgcaaagactatcagttggtagatattgaggacgagaggtgtgtacttcttagcggaggaaaacaacgagacgagatcagacctgaaacttgatttggagaatgatgaagtacacaagaagatcaagcaagactttgacgaggggaaggaacttttggtgaccgtactttcggcaatgaagatagagaagataattgcttccaaggagcttaattcgtaagctagttgctgact

SEQ ID NO: 4944 - DNA, 514 bp, Cyanidium caldarium
  Clone ID: LIB190-052-Q1-E1-D3
ggggggtaggggggggggcggggggggggggggggggggagggggggggggcgggggggggggggggggcgggggggggggtggaacttcggggccgggaggggttacggctcgagccaggcgtccggccacgcgtccggacgtctttgcgtgttctgtagagaaatggttattgttcccaagacgagacgtacattttgtcctggaaagtgtagaaagcgcactttacacaagggggcggagtaggggaaaggaaaagactccctgggtgcggaaggaaagagaagatacgaccgaaagcaaaaaggttatggcggtcagaggggggcgggggttcgagaaaaggggaggacaaccaaaaaaatagtattactgcgcgagtgtgtggactgtcactacaagacgcagcatacactgaagcgttgtaaacacttcgagttgggcgatcaaaagaaagttcgaggtggagttactttttaaataaaactatgttcgaaagatacaaacataagtg

SEQ ID NO: 4945 - DNA, 226 bp, Cyanidium caldarium
  unsure at all n locations
  Clone ID: LIB190-052-Q1-E1-E1
acggtcaggaattcacggctcgacccaggcgtacggtaacacatgcaagtaggtaaagcgaacgggtgagtaaagaggtgtgaaagagtggaagaacatgaaagcacagaagaatgtaagaaatggttgcagtaaaaaccatcaggggagtgagaggggaatctgagaggagggggggggggggggnaactgagaaaaggtccaaacaagagaagtgagcagtgcg

SEQ ID NO: 4946 - DNA, 353 bp, Cyanidium caldarium
  unsure at all n locations
  Clone ID: LIB190-052-Q1-E1-F1
taccggttaggaattcccggctcgacccacgcgtacgcgagaaggagagggcgtaagacgtgatacagagtaggaagaaaagagaagagagctagaaaggaggtaaaagaagagtaaaaggactagaagacgtacggaattcacgaggagggagcgtgggggaaggaggaatcccacgggggcggggggagaaaaagcttcggtgaaagcgtgaacggattttgtacacactgtgggggagcggggggaantgtgtggcggggtaagcangacaagtagaagagagtaggagaagaggaaaggaagtgaagacgtaagacgtgaaacaaattgcaaaagggcgggcgctccag

SEQ ID NO: 4947 - DNA, 424 bp, Cyanidium caldarium
  Clone ID: LIB190-052-Q1-E1-F3
aattaccgggtcgacccaggcgtccgcccacgcgtccgaggaacccgtgtagtctatgcagtaaaagaaagaatgagtaagaaaaaagggagtcattccaccaggggagtaaaggcgcaagaaagaaacccaaagcaattgacgggaagcggaaaaaggggtggatgacgtgggttaatccgataaaccgagaaccttacctctccaagaaggtgttgcaggggggtcggaggaacgtgctgtgaagtgggagaacgtacgagaaagccaagtgacgaaaagaaggcaagtagagggcggcccgagaaaggagagggcgtaagacgtgatacagagtaggaagaaaagagaagagagggtacgcttagaagcagcaaaccagagaggaaagcgttaaagcatgaaagaaaagaaatccgaaaaa

SEQ ID NO: 4948 - DNA, 410 bp, Cyanidium caldarium
  Clone ID: LIB190-052-Q1-E1-F7
attttgtggattgatagtttttatactatcgacgcattgtttgaatatctgccctatcaacttttgacggtaggatcgaggcctacggtggtgttgacggctaacggggaattgggggtacaagaatggaatgaggtggggaagatatcttccttagatacttggaagcttgtgcttggtacaagagcggggggtgcgggggatgttacagggaggtgcacaagctgacgagcatcttgtcctttttatactcgggcgaacaaccgagagtggactatatcgttgctgaggatgaagcaagttgggaaaagttgtggagaggaaaacgcgaggtcattggatatactttggaagcagctttacagaaaacttgtattgtggaaaaccagttgagggagtggacaaagaaa

SEQ ID NO: 4949 - DNA, 402 bp, Cyanidium caldarium
  Clone ID: LIB190-052-Q1-E1-G1
taccggtctaggaattaccggctcgacccaggcgtccgggtttacgagagaaggaagtagaaagaagagagtgtaaggcggcgtcataatagaaatccgaaaggagtagaagaaaagagagagaagaaagagaagaagagaaaagccgtactgaagagcggcacaggtactcgaggacaagggagacccaaattaaggtgagagaatggacgataaggaactaggcaaaaggatgagggagcggcggtagaacataggagagaagcagcaccgactgtttagcaaaagcacagcactctgcagaaaagagaaaatgtaaagtatagagtgtgcggcctgccaaatagtagagaagaaatccatgaaagtgaaagcgagtaaaagatgaggtatacagaatgg

SEQ ID NO: 4950 - DNA, 400 bp, Cyanidium caldarium
  Clone ID: LIB190-052-Q1-E1-G11
gaattcccgggctgacccacgcgtcaggctgcaacttgcaactcgtctccttttcgttcttctttcaccgcaccgctatgcaaaaaatgtgcttgtcgtcctaccccttcgttgcctagagtggacgatgataccttttcgcgccaagtcgtgtccatgaaaggcagaagggacctcaaaaaggaaaagaaactacgcaatttggagtttgctaggctgcatcggaagaaaaaagaacgcaagagaaaggtgaatcaagagacgttgcgggtgatggacgataataactttgtaagggaagtgttttctgcatcggaagaatcatcgagtagtagcagccagttggagactggatagcatatggatgaataagatagtgaggtttagcaatgcaccaaaa

SEQ ID NO: 4951 - DNA, 284 bp, Cyanidium caldarium
  Clone ID: LIB190-052-Q1-E1-G5
gacatagaatggcaacagataaagtcagctaagaagatatactcttgtgtaaaagaatcatgggggcggggagtagttggagctagacgattcggtggcaggaggcagtggattcatcttgtagcaccaagtggctgtttattgcaacgcggggggtgcggagttgcttgtagggaggggcagcgaattgaaatgattcctttgaggaaagatataaaggaattgtttttctctactttaaagaagaactttgagtcgaacgaagcgtcatgggagtgcagtgt

SEQ ID NO: 4952 - DNA, 291 bp, Cyanidium caldarium
  Clone ID: LIB190-052-Q1-E2-A11
agcggacgcgtgggtggtagcagttgtacattcaacatcatcaaatgccaaagggaggaaagaaagattcttcaaagaaagaagccacaagtaaacctgcagcagcagatgctacaaagacgacagaaaagtctggtccggaagccaagttgaagggaactggtgcacagaaacaagaaagagttgactatgcatgtgcctgttatgttatgtgagttctgtttgatagtttccagctattcttttggtagtgaataaagagaaaatttgttatatttaaaaaagatgaat

SEQ ID NO: 4953 - DNA, 369 bp, Cyanidium caldarium
  Clone ID: LIB190-052-Q1-E2-A5
agcccacgcgtccggagattttgcgcgccatttctctcaatggaagcttggcgaggtggtatgaagagaaaaatttgtagtcttgcgaggcaacattcctccaacaaacgtagaataacagacaacatgtgggacagagcacaggatatactgcctgatgataaaccaatattttatggaaaaaaaaaaaaaataaaaaaaaaaaaaagaaaaaaaaaaaaaaaataaaaaaaaaagaaaaaaaaacaaaaaaaaaaaaaaataagaaagggtaacaacacagtaagagttcacactaaaagtagtattcaagggggaatcaaaggaacatcatcgccgtaacataaatcaaaaacaaaaggggggggg

SEQ ID NO: 4954 - DNA, 278 bp, Cyanidium caldarium
  Clone ID: LIB190-052-Q1-E2-A6
ggtaccggtcaggaattcccgggccgacccacgcgtcagcccacgcgtccggagattttgcgcgccatttctctcaatggaagcttggcgaggtggtatgaagagaaaaatttgtagtcttgcgaggcaacattcctccaacaaacgtagaataacagacaacatgtgggacagagcacaggatatactgcctgatgataaaccaatattttatggaaaaaaaaacaaaaaaaaaaaaaaaaaaaagcaaaaaaataaaaaataaaaaatccagaaaa

SEQ ID NO: 4955 - DNA, 273 bp, Cyanidium caldarium
  Clone ID: LIB190-052-Q1-E2-A9
tgtacattcaacatcatcaaatgccaaagggaggaaagaaagattcttcaaagaaagaagccacaagtaaacctgcagcagcagatgctacaaagacgacagaaaagtctggtccggaagccaagttgaagggaactggtgcaaagaaacaataaaaagttgactatgcatgtgcagtcctgttatgttttgtgagttctgtttgatagtttccagctattcttttggtagtgaataaagagaaaattttttataaaaaaaaagattgaggaa

SEQ ID NO: 4956 - DNA, 423 bp, Cyanidium caldarium
  Clone ID: LIB190-052-Q1-E2-B12
ggtcaggaattcccggctcgacccaagcgtcagcccacgcgtccggaatattgttgcaaggccagggcagcacagatatcaagttggaagcccgaaacagttattgtcgccgcgttctttgtttttactacaaacattagaatggaattggggcaagaaaactctagagttcctacccctcccccacaactgcacctaatttttgagcgacccggagctctcaatactggtggtagagcagcgatggctgcactggcttctgttttgtctggaaaaaaccttgtgatacaacccaactggatggacaacgaggggtgtaacaaatattgtatggataaacgggattatatgggatgctgtagtttggtaacaatacctgaagagtggccgttgttggagtggaacgcggaaaatattccccga

SEQ ID NO: 4957 - DNA, 390 bp, Cyanidium caldarium
  Clone ID: LIB190-052-Q1-E2-B9
agattgaaatggcgccatggaacctatttcggattgatcctttttctttctctgtgtgtgtgtgtgtgtgtgtgtgtggattggcgccttgtcttggatgaaagtttcgcggctccgtttcttgactctggtgacgttattctttacttgccttgttttggtgacaagcaagacagacacacaagggttatttcacagggcttctgaatcaattccgttgcatgattccaacgagtccgtcagtggctcgacagaagagtctttcgagtttcaggccgaagttcaacgcctgatgaacatcatcatccattcgctgtattctaacaaagaaatattcgttagagagttggtttcaaacgctgccgatgcactggaaaaattgcgttttct

SEQ ID NO: 4958 - DNA, 423 bp, Cyanidium caldarium
  Clone ID: LIB190-052-Q1-E2-D2
cgggtcgagccacgcgtccgctttatgtagtgttgaaaggttttccgtgcaaagtggtagacatatccacctcaaagacagggaagcatggccacgcaaaagccaacatagtaggtattgatatcttcactggcaagaaatacgaagaaatgtgtcccacctcgcacaacattctgcagccggtggttaaccgcaaagactatcagttggtagatattgaggacgatgggtttgtagttcttatggatgaaaacaacgagacgagatcagacctgaaacttgatttggagaatgatgaagtacacaagaagatcaagcaagactttgacgacgggaatgaacttttggtgaccgtactttcggcaatgaagatagagaagataattgcttccaaggagcttaattcttaagctagttgctgac

SEQ ID NO: 4959 - DNA, 425 bp, Cyanidium caldarium
  Clone ID: LIB190-052-Q1-E2-D3
gtctagaattaccgggtcgagccacgcgtcagcttttagtagtgttgaaaggttttccgtgcaaagtggtagacatatccacctcaaagacagggaagcatggccacgcaaaagccaacatagtacgtattgatatcttcactggcaagaaatacgatgaaatgtgtcccacctcccacaacattctgcagccggtggttaaccgcaaagactatcagttggtacatattgaggacgatgggtttgtagttcttatggatgaaaacaaccagacgagatcagacctgaaacttgatttggagaatgatgaagtacacaagacgatcaagcaagactttgacgacgggaaggaacttttggtgaccgtactttcagcaatgaacatagagaagataagtgcttccaaggagcttaattcctaggct

SEQ ID NO: 4960 - DNA, 453 bp, Cyanidium caldarium
  Clone ID: LIB190-052-Q1-E2-D6
gtcaggaattcccgggccgacccacgcgtcaggtactcctcgaaagctatataagtagcgtatgcaggaaagaagaaggtaaaggaagagaaggaagaagcagagagggactatgagcgagaaggtggatagtcgagagggaaaaagcccagaagccaagataaggtatcaaagtaaagaaagaaggaaaaggagaagaagagagggtaggcttagaagcagcaaaccagagaggaaagcgttaaagcatgaaagaaaagaaatccgaaaaagaagagaaaaaggtaagaaagaggaccgaatcagggtaagaggtagaggagcaagaagagaagagagaatgctgggtggagtagcgaaacaagagaagggaagtaaaaggtaagaaagacgaaacgtttacgagagaaggaagtagaaagaagagagtgtaaggcggcgtcataatagaaa

SEQ ID NO: 4961 - DNA, 411 bp, Cyanidium caldarium
  Clone ID: LIB190-052-Q1-E2-D9
aggtaccggttaggaattcccggctcgacccacgcgtacggggaaaccaaagacatttgggttgcaaatgttggaggaaaaccacaaagcgttttactcattgaaaagtttgtcagtttaatggaaaacgaaaaggaagaacgggagaaatgggcgatggaagcatggaaaacgcagttaattgtcgatgctatttatcaatccgcagaaaccaagcaagtagttgtcatgaaatattagttttctttgtagtatttctaaagatttccatgtttgtatcgtatatgattactgagatgtacacgacgaggaagtcagtgtttgttgaagaaagctttggctatacaactgggaacgatgacttgtgcaataaatgtcacacaaatgtgacgtttttgtacgagcaagtgc

SEQ ID NO: 4962 - DNA, 393 bp, Cyanidium caldarium
  Clone ID: LIB190-052-Q1-E2-E10
ccggctcgacccaagcgtccggcaagtttccagatacaaagaagaaaattctatgctccgagaagccttggatcgttttcgttcgagcaggagtttatgtggtgcggagacaaggacgagtgtatgttatccagagtctgaagaagattcatcgggagaagtgcaatagaggagaaagcggcggcggaggaaacgggaggatattaccagtccgaagaggcaagatagtgactcacgggagagtgatgattccagtcgcctggaacgagagcaatgtaacgaagaagagaattagttcaatcacagacttgattctctttacttgaagtctaatcggcagaataatgtgacaacagatcctgcatagtttgtatcccttggtaaagatatgac

SEQ ID NO: 4963 - DNA, 393 bp, Cyanidium caldarium
  Clone ID: LIB190-052-Q1-E2-E12
cgacccacagcgtcagcccacgcgtccgcccacgcgtccgcaagttcctatgatactctttatatctcaaggctctcattacttggaaaggatggcagatgttggttttgatattatttctgtggattggacggtggatattggcaaggcgagagaacgcatgggttcttcttctggtattcaaggcaatttagatcccgctattttgttagggacacctcaactcattgaagagcgcacgcgtgagattattcataaagctggacctcgtggtcatattatgaatttgggacacggcgtattacccaacacaccagaagaaaatgtagccaaattctttcaaacggtgcaacaatttcgttggcaagaataaatttactctattagctgcgg

SEQ ID NO: 4964 - DNA, 466 bp, Cyanidium caldarium
  Clone ID: LIB190-052-Q1-E2-E3
ggtctagaattaccgggtcgagccacgcgtccgccattttcctctgtcgtggataggcgatgacttggttaagattgttgcttacgaggcaactggcagggaaatgtggaaatataacactagttggtagtcttccatccattcgatcggtctctagtgttcttccttcatgtaactattccttcgcaagtaacattcaaaggagatccttctcggctgttccttcggaggaaaaggcaaataaacaaaaggaagaagctaatgttacacaagatacttccaaaagtacttctccaactgttttgcaggatacttatggctttgaattaagaacaggccgagcggacaggatgccttcttcgtttgagcaagccacgggaagtgaacgagcagaattggaagatcccgatatctatcgtaatcctgaaaagtttgtcaacagcagagttatgattgcaccctttgg

SEQ ID NO: 4965 - DNA, 431 bp, Cyanidium caldarium
  Clone ID: LIB190-052-Q1-E2-E6
cccgggtcgacccacacgtcaacacacattcatgtttgcctttcagtacagcttatgttccagttctatttatctaaggagagttgcatggaagagtatcaattatcatggttaccctcgagttggcgtacctaataatagggtaatctttccaggaattatctcaagtgctgccgatagtagcagtgcaaaggaaggtgtcaagaatatcgttgataatatcaaggaaaaaggttctgaaatatatcactcagttgaagaaaatgtaaagaagggagcagaaaaagtatcagaaaacgttgatgaattcaaagacgctgtgcaggatagaatggaaaatgcagatacttccagagcagaagacgtagcacgagatgttgtagataacgtcaaagatgctggacaatccggtaaagaaggtgtctctgatg

SEQ ID NO: 4966 - DNA, 409 bp, Cyanidium caldarium
  Clone ID: LIB190-052-Q1-E2-E9
ccggctcgacccaagcgtccggcaagtttccagatacaaagaagaaaattctatgctccgagaagccttggatcgttttcgttcgagcaggagtttatgtggtgcggagacaaggacgagtgtatgttatccagagtctgaagaagattcatcgtcaaaagtgcaagagaggagaaagcggcggcggaggaaaggggaggatattagcagtccgaagaggcaagagagtgagtcacggcggagtgaggagtccgaaagagaggaacgagagcaatgtaacgaagaagaaaattatttctatcacaaacttgattctctttatttgaagtctaatcggcagaataatgtgacaacaaatcctgcagagtttgtttcccttgtcaaagatatgacagagcctcttatgaag

SEQ ID NO: 4967 - DNA, 348 bp, Cyanidium caldarium
  Clone ID: LIB190-052-Q1-E2-F5
taacggtcacgaattcccgggccgacccacgcgtcagaggttatgcagttgatcaagctacttcaagtgaggaagatacagtcgtggtcatacactttggtccagacgttcatccgacatgtatgttgatgcgacacacatcttactgcgcagctcaagtgataaccttttttgctgtcctctattcggtcgatataccggaagtatctgactttaactctatgtattaagtgtatgattcttgtaccgttatgttcgtcattcggaatccccatattatggtagacatggctaccggtattaagaggttgatcaactgggctaccgctgactttcaggatcttattg

SEQ ID NO: 4968 - DNA, 416 bp, Cyanidium caldarium
  Clone ID: LIB190-052-Q1-E2-G1
aggccggtcaggaattaccgggtcgagccacgcgtccgggtttacgagagaaggaagtagaaagaagagagtgtaaggcggcgtcataatagaaatccgaaaggagtagaagaaaagagagagaagaaagaaaagaagagaaaagccgtactgaagaccgacacaggtactcgaggagaaaggagacccaaattaaggtgagagaatggacgataaggaactaggcaaaaggatatggtatctgcggtagaacatatgaaagaagcagcaccgactgtttagcaaaaacacagcactctgcagaaaagagaaaatgtaaagtatagagtgtgcggcctgccaaatagtagagaagaaatcgatgaaagtgaaagcgagtaaaagatgaggtatagagaatggcggtcctaacagta

SEQ ID NO: 4969 - DNA, 344 bp, Cyanidium caldarium; identical to SEQ ID NO: 2605
  Clone ID: LIB190-052-Q1-E2-G10

SEQ ID NO: 4970 - DNA, 325 bp, Cyanidium caldarium
  Clone ID: LIB190-052-Q1-E2-G11
agggtgaaacttcgtcctcgtctcctctccggaccacatgtagtgtagcgtgagactccaaatatgtggggggttctaatttgtcgttgcctcgagtggaagattattttcgctcgagacaagttgtgtcgatgatgtggagaagggcaagttgaagagaagatactttgtggtagatggagttagtgacgcagcatgtgaaaagtattgcactggttaaaacagtgattcacaagtcgtagcgggtgtgagattgataccgtccgctgtcggagattctttcgttcctagtattgcaatttacttttgtcatcgagtaagagac

SEQ ID NO: 4971 - DNA, 367 bp, Cyanidium caldarium
  unsure at all n locations
  Clone ID: LIB190-052-Q1-E2-G2
acgcgtcagcccacacgtccgcggacgcgtgggtgcaggcaatagaatgacgcagtagatcagagactancacatgcaagtaggtaaagcgaacgggtgagtaaagaagtgtgaaccagtggaagaacatgaacgcagacacgaatgtagaaatggttagagtaaagtccatagaagaagtaaaagcgggaatctgagaggatgaaagccacatcggtactgataaaaggtccagcaccacagaactgagcagtggggacaattgacgcatctacagggaaataatgtccagtatagaggattggactaccagataatgaagtagaaagagggaatgatgggaactaatggcacatgacagtatcca

SEQ ID NO: 4972 - DNA, 463 bp, Cyanidium caldarium
  unsure at all n locations
  Clone ID: LIB190-052-Q1-E2-G3
ggtctagaattaccgggtcgagccacgcgtccacggctcgtgagatgctactccacaaggtaaagaacccttcgagagtggactttgtccatgtcgatgttatggaaaaatctgtactttctagcgtattaaaggatgctgaagtggttttcttctgtgcttcagcttctgcagggtggagagtccctggtacttctaagaacaccccgaaacaggtggactacttgggcgccattcatgtcgcagaagcggcagcccaagctaaggttaaacgtctcatcttggtaagctcagcaatggtgactaaccgaagttcattcccttatttgttcttgaactctgcatttggacgaattatgcattggaaaaggcaaggagaaattggagtcatcaaagttcatgagaaaaatccagaaatggcttatactattgttcgcccaggacacctgatanatgagcctgc

SEQ ID NO: 4973 - DNA, 338 bp, Cyanidium caldarium
  Clone ID: LIB190-052-Q1-E2-G5
gacatagaatggcaacagatcaagtcagctaagaagatatactcttatgtaaaagaatcacaaaccaaagaatatttggagctagacgattcgttgcagcagccagtggattcatcgtgtagcaccaagtggctgtttattgcaaccccactgttggaagttgcttgtactgatgggcagcgaagtgatatgattcctttgaagaaagatagagaggaattgtttttctctactttatagaagaactttgagtcgaacgaagcgtcatgggagtgcaatgtacttgacatcgcagttgctgtttttatccagtattatgaagagtgcgtggaacagta

SEQ ID NO: 4974 - DNA, 387 bp, Cyanidium caldarium
  Clone ID: LIB190-052-Q1-E2-H10
gacccacgcgtacgtgattcttcttcttctggttcttctggttctgagagtgacgatagctttgattcgtcatcagatgaggatagctcggatgatgagtactatagttatgatgaagatatttctgattatgattcggaagaagaagttgatgacttgttttcagaagaagacacggattcagaagaagaaggttccagtgactcggatgacgtgtaaaagagtgtacagtgcagcaatggaacaaaagttgtttcgcaacagtgtatagacagaaatagatagatgtagaaaggaaaacacgcaactattattatctattcttttcaccaaggaacaaccgtttgctcgtccttgtgggcgtatatatgtccatagattatctaa

SEQ ID NO: 4975 - DNA, 463 bp, Cyanidium caldarium
  unsure at all n locations
  Clone ID: LIB190-052-Q1-E2-H3
cggtctagaataacgggtcgagccacgcgtcagatttgaaacgcgtgtttggttttttactttgtacttgattcttgtaaaacatgtctgacgatattgttgccttggttattgacaatggctctggtatggtgaaagcaggagttgcaggggacgatgctcctcgttccgtcttcccttccatcgtaggtcgaccaagacaccaagctattatggttggtatgggacaaaaggaaagttatgtgggtgatgaggctcagtctcgaaggggtatactctctttaaaatacccaatagaacacggtattgtcactaattgggatgatatggaaaagatatggcaccatactttctacaatgaacttcgaattgcacctgaagagcatccagtcttgttgaccgaagctcctctcaatccanaggcaaacagggagaanatgactcagatcatgttttgagactt

SEQ ID NO: 4976 - DNA, 300 bp, Cyanidium caldarium
  Clone ID: LIB190-052-Q1-E2-H5
aatccgggccgacccacgcgtcagaagaaactaaaggcgcgcaatgtcgtttttgtgggaaaaaaaaataaagacacaaaaggaagagattaaaaaaaagaatcacacaaaacaaggatttaaattgctgtcgtggcaagcggcattgtgtcattcatgtctgtgcaacagatgtacaagttgttgtatactgtctccaggactaaatttgttaaccggtcttcaagtcattttataacggtgatatcttggaacttccctgccattactctgcttcttcaccttgacccctttgtccaa

SEQ ID NO: 4977 - DNA, 220 bp, Cyanidium caldarium
  Clone ID: LIB190-052-Q1-E2-H7
agagtgactgtcttcctattccattttccatacaatactctaattgtccgtaaggtttcaatattattacaagtaaacatgagttgttcaaagtaaaaaaaaaaaaaaaaaaaaaaaaaaaaaaaaaaaggaagaaaaaaaaaaagggacaaaaaaaaaataaagataaaagaaaagtaaaaagttcatgaaaagagtaaaaaaaaataaaaataacggg

SEQ ID NO: 4978 - DNA, 419 bp, Cyanidium caldarium
  unsure at all n locations
  Clone ID: LIB190-052-Q1-E2-H8
gacccacgcgtcagcccacgcgtccgcccacgcgtccggcagaatggacgacaggcttccacgtttcaaaagaactttccacagagtgctttataagaaaagaaaggaagacacagtaaatgaggcgagaaagcataggaagtgaaacgatangaaccgtgtagtctatgcagtaaaagaaagaatgagtaagaaaaaagggagtcattccaccaggggagtaaaggcgcaagaaagaaacccaaagcaattgacgggaatcggaaaaaggtaagaaagaggaccgaatcagggtaagaggtagaggagcaagaagagaagagagaatgctgggtggagtagcgaaacaagagaagggaagtaaaaggtaagaaagacgaaaggtttacgagagaaggaagtagaaagaagagagtgtt

SEQ ID NO: 4979 - DNA, 246 bp, Cyanidium caldarium
  Clone ID: LIB190-052-Q1-E2-H9
ggagtgagtgtgcagaggactcgagccaatcgattggaatcctattggcaatgactttgtcgtggagttgagttctggtacggtgttggatcaagtttctttggaagacagagaatattatgattatgatgaaaaggaaaaggaacaagtcgctattaccggtttagaatggcaatggaagagagtataaatttccaaacaacaacaataatagaaaatatagtcatagaaattgttttccacaat

SEQ ID NO: 4980 - DNA, 395 bp, Cyanidium caldarium
  Clone ID: LIB190-053-Q1-E1-A12
gcgtcagaggaaagagaatcatgaggtagaggagtacgggtgatagtggtagtgcggagtataataatatggagtatatgaggatatggagaggagagtataatgagatggataaggtacagtacgataagtcagatgggatatatgttaatgggaatgactatgggtaataaagaggagagtgtacaatattacataactgtatacagtgtactgatgatggtgatattaggatggtggagtgagaagagggagaggaggatgaatgagttactaggagaaggaaagaggaatagtgtgcagactataatgttaatgatcacgatgtattcgatgatgggaatgccagttatggcacgattttggagtaagtatacggtaatgatggagagtgt

SEQ ID NO: 4981 - DNA, 394 bp, Cyanidium caldarium
  Clone ID: LIB190-053-Q1-E1-A2
tgacggtcaggaattaacgggtcgacgcacgcgtccgcaatatcgacaatggatggaacaacggcatcaacagtggatgcaaaatgaagaagaagaatcgacagaaaatcatcatggcaagccttggaaacgtcgaaagacggcatatagtagtaatagtagtagtagtagcaatagtagcactagtcaaaaaggtcctagtacgagtgttttggtagatgttgttgcatccgatggccaagcaaagaagagaggggatcgttggcttgatgaagaggagacttgggaggagaatactcataataataatgaggatgatgaggatgatgggaaagagtcgcaacaacaacaagaagaaaagcgtttacgcaagatggcttcttatttggcattg

SEQ ID NO: 4982 - DNA, 411 bp, Cyanidium caldarium
  Clone ID: LIB190-053-Q1-E1-A6
aggtaacggtcaggaattcccgggccgacccacgcgtcaggaggaagtattcaacaaggcagcggaagaagtaaaaaaactgtcttcggcatccaacgaagacaaactggagctatatggttactttaaacaagccaaggagggtgattgctccaccgaaaaaccaaaaggtctttttaatcaaaaagaaaaagcaaagtgggacgcctggaattccaaaaaaggtatttccaaagaagaagcacagaaaaagtatatcgaaaaggtcgatcaactatgcggcacgcagtttcttcaaagcgtttcctagtcaccttaggtccttgctctttttttggtttgtcggtcctaattcccaaaaaatatgagtaaagtacccgtttttttccgcaaaaaaaagaaaagaaaacg

SEQ ID NO: 4983 - DNA, 355 bp, Cyanidium caldarium
  Clone ID: LIB190-053-Q1-E1-A8
aattcccggtccgacccacgcgtcagcccacgcgtccggtttgattgggctgtggaagcagttgtaaactttttcatgatgtggtggtggtttgctggtgctttgagtgtgatgatatcgaagcctagtgcccagtttcagcggagatatggttttggtttggaacttagtactattgcagcctttaactggttgaactttggttttcattttaccgaactctatctgtctattttgacgacgtatgtggcgatgcgcatgctaatccatattgcataagatcattacgctgactactaaggtccttacgctcattctgcattgtcgctcctgagtcccaaaaactctgtttgtg

SEQ ID NO: 4984 - DNA, 133 bp, Cyanidium caldarium
  Clone ID: LIB190-053-Q1-E1-B1
agtgcggtcaggaattacgggtcgagcccgcgtccgcccaaacgtccggactgtggacggctccacattactactgttcctatgattgttattattattgcgcaattgacaatactagacactttccatagaa

SEQ ID NO: 4985 - DNA, 347 bp, Cyanidium caldarium
  Clone ID: LIB190-053-Q1-E1-B2
ggtctagaattaccgggccgacgcacgcgtcagacgcaatagatcagacagtaacacatgcaagtaagtaaagcgaacgggtgagtagagatgtgtgaaagagtgagggaatatgatgagcacaaaagaatgtaagaaatggttagagtaaaaacgcataaaggaagtaaaagcaggaatctgataggaggaaagccacattggcactgacaaaatgtccaaacatgaaaagtcatgcaatggggaaaattgggcaatgtacagggatatatgactcagtaatgaagagtggagttcacagactatgaagtcgaaggaaggaatgaacggaagttatggcaaaaaca

SEQ ID NO: 4986 - DNA, 418 bp, Cyanidium caldarium
  Clone ID: LIB190-053-Q1-E1-B3
acgcgtcagcaacataggcatttcatctattcaatgggttgaagctggtgaactatatgaaacggaagtgagaagcatatgtgcggcatggtcggcattttggatatttgctagtgcttttgtcaatacatatacatttagcaaacaagtcgatgcagttggagtaaagggcctgtatggactatatacagggtttactgtgttcttcatgatagtcttgttcttcatctttccagagacaaaaggcaagacattggaagaagtgaaagaaattatggaaggaggtttaccattcattattcataagaatatcgtagatgcatggaataacgtcaagtatttgttctcttttggtaaacaccaatcccagatcaatagaaacctttggaagagtctacagattcgtaactcagtctac

SEQ ID NO: 4987 - DNA, 274 bp, Cyanidium caldarium
  Clone ID: LIB190-053-Q1-E1-B4
gtcagcaaagactttgtattccttgttacttgttgcccggtgcaagataagctcgttgaaaagtacgggctaccgagtatagaaccgtactcggaatagccggctccaacaacggaacatacaaataaaatagtttattggcgtgttttggagtttggtcaaaaagaaaaaaaaaaaaaaaaaaaaaaaataaaaaaagaaacacaaaaaaaaaaaaaaacaacaaaaaaaaaaaaaaaaaaaagaaaaaaaacaaaaggggcggctcccacaa

SEQ ID NO: 4988 - DNA, 418 bp, Cyanidium caldarium
  Clone ID: LIB190-053-Q1-E1-C10
acccacgcgtccacccacgcgtccgcccacgcgtccgcccacgcgtccggatgctcattccaagagatcgtccagtagcaaccagacttcgagccaagagagcaccgaggaagatggtggagaagatggtattcatagcaatactgtggagaccgacgtgttacctccaggtggtttaggcaatgctaatctccatgagttggctgaaaatgctgcaaagagtctcgtcataagtatgacggaaagcgccaaacagtcccaagatggaggcggtgaagcggatgaaaacttggaatggtgtgcggacacatcaaaagaagcaattaaggcaaggcaagcagaagctgcagcagctgcaaaggttttggaaggtttgacggattctaagaagaagaagaacgtcaatgttcctgtggag

SEQ ID NO: 4989 - DNA, 317 bp, Cyanidium caldarium
  Clone ID: LIB190-053-Q1-E1-C9
cacgcgtcagtaccgagactgtgaatgatttatgtccgtatccgcttattgaaaacaaggaaaaacgtccagtttctttttgttctatttatggtccaagcggcgactgtttggatcatatttggtctggagtgttgccagttttgaatattcacgactatattttctttccaaagattggaagctttctatccttgggtttacgcgaatttaatgacttttcacgcaaagtagatactcgttatatcgttactttgtgaataaaaaacaacgagttgttttattcaccaaaaacaacggcgaacatccgaaaactc

SEQ ID NO: 4990 - DNA, 399 bp, Cyanidium caldarium
  Clone ID: LIB190-053-Q1-E1-D10
gggcgaacactacaagtagggatggaaacgcctaactgtagttcacgattgatattgctgttttgtttggtctttataacgactataactttggtaaatgcaaaacgaaactattataaagtgctgggcgtggaaaagaacgcttccgagagtatgtggtttagcgttcattctccaagtttctttgacttttgttaggagaaattaagcgcgcgtaccatcaactagcaaggaagtatcacccggacaagaacggcggtgacaaaaaggcggaactgaaatttcgagaaatagctgaaggtaagtgctggtaacttgttggcttcttgcttcttttatcgcatttgtttagcatatgaagtcctatcagacccacagaagagagacacgtacgacttg

SEQ ID NO: 4991 - DNA, 447 bp, Cyanidium caldarium
  Clone ID: LIB190-053-Q1-E1-D2
ccggtcaggaattaccgggtcgagcacgcgtcagcccaaacgtccgcccacgcgtccgagatggctgtttggcttggggaagctgcctgtacgatcgtatttaccacttagggaatatagttctcattgttgttcagagacggaaagaatatttcggagcttcaagattagtttggggtatacataaaaagttccgagagaccattggcaacgaaggaaaattgagaagagattggaatgggcgcgaaacgataagattcttgccaactagagtcgatgcaaccattaggaaagattgtgctagaataataccagcgaacaaaggagtaaataatgtttgatgagagaaaagactcaagaagtctatcatcgcgatatcatagagctgataagtcaatcactgtgtcttaaagaaaaaccaaatctcttgtatttatggaaatttct

SEQ ID NO: 4992 - DNA, 437 bp, Cyanidium caldarium
  Clone ID: LIB190-053-Q1-E1-E1
gggtcgagccacgcgtccgggaagaagaaggaaagaatagtgagtttgtacaacaatggccaatgatccatcgttgttttgcttggaagagagtagaggaagtcattcaagcgttaaagaaagagaccgaagcaactgcagattctacaagcaagtttgcacaacaagccttggaacaaatattgaaaggttctccaacgagtctcaaagtaactttggagtccatcgaacaagcttcacagatgacattgaaacaaaccttacaaaaagatttccgtatgtcgatgcactttatgaaaggtcacgacttttatgaaggcattcgagcaactttggtagataaggatagaaaccctaaatggcaaccggacaagttggaacaagttactagagcaccggtagaagaatactttaaacccttgaaagatatacccgac

SEQ ID NO: 4993 - DNA, 295 bp, Cyanidium caldarium
  Clone ID: LIB190-053-Q1-E1-F10
acgcgtccacccacgcgtccgggttgagattggttttcttttcgtccacgcttcgttccgttactttttgtcgtgacaagttataatataaaatggccaaagtaaaccctgtgtcgtcggctcctaaactaagtgtaactagagagatagctatcggtattgggcttggtatagcgtgtgctatggtatttcgccagtggcaactccgatacaccgaaatgataataaaataataaccccaattggatgaaccagaacaaaattccccctcgtccttaaaaccgccctgtgtttg

SEQ ID NO: 4994 - DNA, 292 bp, Cyanidium caldarium
  Clone ID: LIB190-053-Q1-E1-F2
gcgtcagcccacgcgtccggatttctgtttgacgcgcttcgtgtccccactttcccttttttgtaaatcttcgaaaggctggataggacaagcatcattattcaaggtaactcatgtatacgtggaaataatgcttctgtcgaagtttcttataccggaaattttaaagaaagacagtcgtttttgccagcgtcctttgctagaagaagtggctggctccctttgaggctaactcaacaaagcgactttggcctgccaggaattattgaatatttccacgagcttattctgt

SEQ ID NO: 4995 - DNA, 339 bp, Cyanidium caldarium
  Clone ID: LIB190-053-Q1-E1-F5
agggcttctttgctttatggaaagggttttggccgttcttcttccgtatcggtccacatacagtcttgacctttatatttttggagcagtttaaggcctggtatttgcgaaagctcaactaggcctttgttattggcaagctgaataacactaatacttgtcgtatccatggagttgtaaaaggtccaacggttcgtttacgctcgttcagaatggattctcacaagtattgcgatttttaattgttgtttcgagaaaaaattgtcagaaatttcagagaaacggattggaataaatggcaatttttgctatgaaaaagctcaggtcctatctaacact

SEQ ID NO: 4996 - DNA, 416 bp, Cyanidium caldarium
  unsure at all n locations
  Clone ID: LIB190-053-Q1-E1-F9
acgcgtcagaatggacgctcaaggttatgttgtaccttcactgacggtggatgctgcagttgtacgaggtttgaagccagcactagaaattttattggttactagaaagaaagaaccgttccagggtcgcttggcttttcctggaggttttgttgaatatggtgaggatcctgagcangcagttttgagagaacttgaagaggagtgtggaatacgagggacgagtccttcgctcgttgccgtccgtgggaagccaaatagagatcctaggaaacacgtggtaacaatatgttactatgtagaacccgcacagaaagactctcaggtgaaagctggtgacgacgctgcgtcctgtggttggtattctgtggaaagtcttatgaagagtccagaactttttgctttttgacactacg

SEQ ID NO: 4997 - DNA, 455 bp, Cyanidium caldarium
  Clone ID: LIB190-053-Q1-E1-G4
gtgcggtcaggaattcacgggtcgacgcacgcgtcagcccatacgtccgatcttagtttcagtgtacgcacgcaggttcgtctgagggtttgcagttgtcacgagttgcttgcaatgtgtcgcgacatgggtttcttgagacagtgcgaggaaaccacactgacgacgtcggcccaaagctcggtttacggcgtgtacaacgaggacaatcatttggtccttcaagcatcgctcagattttaagcacgtttgaagtcgcactgtagctctcagtaatgcatggggttaccacggtacaattagcgatctcagaggcagttagcaagcttttcatcactgttatgaaaactgttagttattaccagaacgtgaagtcgaagtcaacgtccaggtacacaatccaaaactccaatcgatacttgtatacagaatgatccacggagcattccacatag

SEQ ID NO: 4998 - DNA, 292 bp, Cyanidium caldarium
  Clone ID: LIB190-053-Q1-E1-G7
cggtatagaattcccgggctgactcacgcgtcagcccacgcgtccgatggaggtaaactggtgttgggttggggtgtgaaggcttggagtctaaggacctttacgagagcgtttctgggattcctggcgttacgggtaagacttatagcgcatcattcgttacaggatggacacagtacgacttatgacaagacttgtggttttccatggaataaaagtataattttttgtaaaagtacgacgtacgaggcccccctagtcgggaaccggacgccggcgtgcgctcgcgcgt

SEQ ID NO: 4999 - DNA, 352 bp, Cyanidium caldarium
  Clone ID: LIB190-053-Q1-E1-G8
agcccacgcgtccggactagttctgtattgattggctctacgtctgccaatagttttggtaccaacttgaatattccattgtatcaagatagtgcacatggacccaaagctgcgttgtggtatattgtctcgggatttgcgatatgttggtctatcgtcgtcatgttttggtttttcagacgcaacaaggccgtgggaatatattgtcgtagggacaacgatgatgcatcctactagcagtgatagtaatagtaatagtagccagggaaaaacagagagagaaagaggggcaagcaacgacaaaaacaatttatacaaataaaccaagatgtttagcgaaaaaaacaaacag

SEQ ID NO: 5000 - DNA, 394 bp, Cyanidium caldarium
  Clone ID: LIB190-053-Q1-E1-G9
gccgacccacgcgtcaggaaaagagaagagagctagaaaggaggtgagaaagcataggaagtgaaacggattaggaacccgtgtagtctatgcagtaaaagaaagaatgagtaagaaaaaagggagtcattccaccaggggagtaaaggcgcaagaaagaaacccaaagcaattgacgggaatcggaaaaaggggtggatcacgtaaattaatccgatataaaccgagaaccttacctctccaagaaggtgttgcacggctgtcgaaagaacgtgctgtgaagtgagagaacgtacgagaaagccaagtgaggaaaagaaggcaagtagagggcggcccgagaaaggagagggcgtaagacgtgatacagagtaggaagaaaagagaagagagc

SEQ ID NO: 5001 - DNA, 237 bp, Cyanidium caldarium
  Clone ID: LIB190-053-Q1-E1-H1
ggtcaggaattaccgggtcgagccacgcgtccgggagaatggaagaggaggaggacgctgcgtattattcacaaatagataaggaagtagtcgagtctatggaagtttccgagagtgtttctgggtttcctgcagagacggagaagccttatagaataccaaactttacaccattgactcaagacgactttgacgaagacttgtggttttccatggaataaaagtatagttttttgt

SEQ ID NO: 5002 - DNA, 403 bp, Cyanidium caldarium
  Clone ID: LIB190-053-Q1-E1-H10
gggccgacgcacgcgtccacccacacgtccgggaaccttcgtattatgtcatcaatgttcggacgcaaagcagagtacaagagagtttttaaagttatggggttcaagtccatattctcgcacgaaacaccgtattctctggaaccagcttcagtttagcaagcgagcagagctccacagaaacgacacttatgcacgtagactatttctaactatggaaaaaggggaagaacagaaatttgcatcaccagaagaagaaagactggcaaagaaacgtgaagaagtggaaagactgcgagccgctgaaaagtttatacgtaaagatgaaggaaaattcggttgtcctgtgtgtgattatgtctacgaaccaagcaaaggagacagtttggctggtatacaacct

SEQ ID NO: 5003 - DNA, 317 bp, Cyanidium caldarium
  Clone ID: LIB190-053-Q1-E1-H11
acccacgcgtccgggaagacagcacgcaaaccctggaaagcagtcaacgaagaacgagacacgaacaaactgagtatcacgaataaaagatggagtagatcaggacccaaagctcacggaagtcacagtaagcgcaggagtcatgctaatgaaagcaggacagtatttgctcaacagagtgtacagctcgtcacttttgcaaaatctcccaacgagtgaacgaggaagccacactattgcatcaccagtagccacgtgagacgccaagccacttgatcatatgctctccaagcgaactaccgctgagtcatatacct

SEQ ID NO: 5004 - DNA, 391 bp, Cyanidium caldarium
  unsure at all n locations
  Clone ID: LIB190-053-Q1-E1-H2
gcgtcagcccacacgtccgggaaaacaacgtggaaactatcgacagaaccaacttaagtgtacctccaatagtgtctgaacgtatgggaaagcgtatgttgtatgctgccagtgttcctctcaccttttttgttctcctttttggttccctattcgtggcaaagtttcagtttgatattacttttatgccatcggtagtagcgtatagttcgttgttgcttattttttgtaccatggcagcactgagttatggtattttttccgcctcgtgggacgtggaagacgaaggaagtttctggggttggaaagagtttcgcataaatattgggcgtacggtacaagggttcaaggcangtgcaagaaaataatctgagaatatataaaccatata

SEQ ID NO: 5005 - DNA, 441 bp, Cyanidium caldarium
  Clone ID: LIB190-053-Q1-E1-H4
gggtcgacgcacgcgtcagaaattgttgatgagaccgatgtttatatggacatgaagacaaagaaacctgttctctttcggggtccagatggtcgcctacatcgcagagcttttatcggaccgaaaaagccacatactcaaataacaattagagagattgacattggaactttaaagcatagttcgagcgacccaaatctatccgttaggagaaaaaaggcggtagaaaacttcaataagcaagtgatgcgcggcgatatcgatgaatggagtttgaggaacctcgcttacactaccgatgatattcaaggctatgagtcagattctgacgaggcatccgataattcaagtaatgtcaatcagcactctcattcttatgcaactgcttccaacagtaggaacaggacaggggaagagcaaggtaataataccgaggcattc

SEQ ID NO: 5006 - DNA, 414 bp, Cyanidium caldarium
  unsure at all n locations
  Clone ID: LIB190-053-Q1-E1-H9
ggtcaggaattaccgggccgacccacgcgtcaggtaaatcgagtctcgtcccaggcagagacaggaatatcatatattataaatagatatatatattcatattcaaagatagatagatcttgtttcgtgtangaatgtctgttcttctctctctccgcttttccgtcgcaaggcatcctagagtttgtccaccactgttgaaaaagtatttttgtgtggaaagcacttcaggccttccaaaaagtgaaactctttcaaccaatgttgcttctagtgacaatagactcaaggtaaatctgttctctacgagttgttcttactggactcttttcagagtagcacggaggaagattctgttcctttgtatcgcaatcgccccggtatccaaccacttcagactccagttggctcgtt

SEQ ID NO: 5007 - DNA, 385 bp, Cyanidium caldarium
  unsure at all n locations
  Clone ID: LIB190-053-Q1-E2-A1
taccggtcaggaattcncgggccgacccacgcgtcagcccacgcgtccgcccacgcgtccgcccacgcgtccggcatgatgaagagcgctatgaagttctttgtatttagcattattttggcaaatgttgttcttactattcaagcagcaacggttttggagactttggagtcactgaaatatacagagtatcttgacatggtaaaggctgcaggcctggactcgaagttcaacgactctgctgttacatggactgtttttgcagcaaacaatactggagtcaatgccaccttggcaccaaagcacttggttatttctaatatcacatctaatgcgacggagagcaaagacattgtggaatatactttgtacaaccatactcctt

SEQ ID NO: 5008 - DNA, 450 bp, Cyanidium caldarium
  Clone ID: LIB190-053-Q1-E2-A12
gtctagaattaccgggtcgacgcacgcgtccgaggagagagaatcatgaagtagaggagtatgggtgatagtggtagtggggagtataataataaggagtatatgaggatatggagaggagagtataaggagatggatacggtacagtacgataagtcagatgggatatatgttaatgggaatgagtatgggtaataaagaggagagtgtagaatattacataagtgtatacagtgtaatgatgatggtgatattacgatggtggagtgagaagagggagaggaggatgaacgagttagtaggagaaggaaagaggaatagtgtaaagagtataatgttaatgataacgatgtattcgatgatgggaatgccagtaatggcaggattttggagtaagtatagggtaatgatggagagtgtaaggagtggagagtattcgatggggatagt

SEQ ID NO: 5009 - DNA, 406 bp, Cyanidium caldarium
  Clone ID: LIB190-053-Q1-E2-A4
acgcgtccacccacgcgtccggaaacaagcattggaagaaaagaatctatgcaatgaatattataagaagaaacaattccaacaagctatcgaacattataacaaagctattgaattggatccttggaatttatcttatcttacaaacagagctgctgcctatttagaaatgggcgagttggatagttgtattgaagactgtcagaaagcagtggattggaacaaggaatataacttgagaacagattataaaataattgccagagcttatgcaagaatgggcaatgcttatgcaaagaaacaagattatgacaaagcaatcgaatgttatgagaaatcgctgttggaatatcacgacgacaaagtatattcgaaatgtaacgaaatgaagaaactcaagaagaaa

SEQ ID NO: 5010 - DNA, 383 bp, Cyanidium caldarium
  Clone ID: LIB190-053-Q1-E2-B3
acgcgtcagcaacataggcatttcatctattcaatgggttgaagctggtgaactatatgaaacggaagtgagaagcatatgtgcggcatggtcggcattttggatatttgctagtgcttttgtcaatacatatacatttatcaaacaagtcgatgcagttggagtaaagggcctgtatggactatatacagggtttactgtgttcttcatgatagtcttgttcttcatctttccagagacaaaaggcaagacattggaagaagtgaaagaaattatggaatgaggtttaccattcattattcataagaatatcgtagatgcatggaataacgtcaagtatttgttctcttttggtaaacaccaatccagatccatagaacctt

SEQ ID NO: 5011 - DNA, 403 bp, Cyanidium caldarium
  Clone ID: LIB190-053-Q1-E2-C1
ggtcaggaattaccgggccgacccacgcgtcagcccacgcgtccgacacacaaaaagaagaatgtcgacgacgcttattgaaaagaatgtggttcaatgacttgagtacttttccagtgacgtattcggttcttcttttatgtgtcattacttggtaataagatatgcctgttggtgactagttaccgagttgttactaggttgtttattacttatcaaggttggtcttatgatatcgttggttgtaactacgatcgagttgttatatataaagaaacttggcgatggattaaaaaaaaaaaaaaaaaaaaaaaaaaaaaaaaaaaaaaatatttaaaaaaaaaaaaaaaaaaaaacaatcaaaaatcataaaaaaaaaaaaaaaaaggggggccgccctaaa

SEQ ID NO: 5012 - DNA, 454 bp, Cyanidium caldarium
  Clone ID: LIB190-053-Q1-E2-C2
taccggtctagaattcccgggccgacccacgcgtcagagagaagagagaatgctgggtggagtagcgaaacaagagaagggaagtaaaaggtaagaaagaggaaaggtttacgagagaaggaagtagaaagaagagagtgtaaggcggcgtcataatagaaatccgaaaggagtagaagaaaagagagagaagaaagaaaagaagagaaaagccgtactgaagaccgacacaggtactcgaggagaaaggagacccaaattaaggtgagagaatggacgataaggaactaggcaaaaggatatggtatctgcggtagaacatatgaaagaagcagcaccgactgtttagcaaaaacacagcactctgcagaaaagagaaaatgtaaagtatagagtgtgcggcctgccaaatagtagagaagaaatcgatgaaagtgaaagcgagtaaaagatg

SEQ ID NO: 5013 - DNA, 290 bp, Cyanidium caldarium
  Clone ID: LIB190-053-Q1-E2-C9
gacgcccgcgtccgtaccgaaactgtgaatgatttatgtccgtatccgcttattgaaaacaaggaaaaaggtccagtttctttttgttctatttatggtccaagcggcgactgtttggatcatatttggtctggagtgttgccagttttgaatattcacgactatattttctttccaaagattggaagctttctatccttgggtttacgcgaatttaatgacttttcacgcaaagtagatactcgttatatcgttactttgtgaataaaaaacaacgagttgttttattc

SEQ ID NO: 5014 - DNA, 441 bp, Cyanidium caldarium
  Clone ID: LIB190-053-Q1-E2-D12
gggtcgacgcacgcgtcaggtgagagaaattcacttccttagtaactatgcgatgttaattttgagtttcacatttataggaaatttctctaaaattgacgattttcttttatttttttaaagttgtttaaaaataatttcaacaggtatccaaggttctttttatagttcttgtgatttgccgtacttgggtgggattggtttatgcgaggggcgtctgttttattcgatgcccgttcccaagttcctcgctcagctccttattgtgggcggtacatacttatttcgtgcgtttcttgaagcttacaggcaggctctgtacaacgctcaagtaagaggcactgcagcgggagcagcaggtcaagtttttcgtgaagaaggaaaaatgtccgtcgaagaagcttgtaatattttaggagtatcaaaaggtgattcttggga

SEQ ID NO: 5015 - DNA, 446 bp, Cyanidium caldarium
  unsure at all n locations
  Clone ID: LIB190-053-Q1-E2-D2
acgctggcaggtgaccggtcaggaattaccgggccgacccacgcgtcagcccacgcgtccgcccacgcgtccgagatggctgtttggcttggggaagctgcctgtacgatcgtatttaccacttagggaatatagttctcattgttgttcagagacggaaagaatatttcggagcttcaagattagtttggggtatacataaaaagttccgagagaccattggcaacgaaggaaaattgagaagagattggaatgggcgcgaaacgataagattcttgccaactagagtcgatgcaaccattaggaaagattgtgctagaataataccagcgaacaaaggagtaaataatgtttgatgagagaaaagactcaagaagtctatcatcgcgatatcatagagctgataagtcaatcactgtgtcnttaagaaaaaacaaatctcttgt

SEQ ID NO: 5016 - DNA, 432 bp, Cyanidium caldarium
  Clone ID: LIB190-053-Q1-E2-D8
agcccacgcgtccgcccacgcgtccggaatggacgataaggaactaggcaaaaggatatggtatctgcggtagaacatatgaaagaagcagcaccgactgtttagcaaaaacacagcactctgcagaaaagagaaaatgtaaagtatagagtgtgcggcctgccaaatagtagagaagaaatcgatgaaagtgaaagcgagtaaaagatgaggtatagagaatggcggtcctaactgtaaggatccaaaggtagcgaagtaaatagacgtttgaaaggcgtccagtatgaaaggagaaacgagtgtagcactgtctagtcgtccaactcagcgaaacagcaataactgtgaaaatgcagtaaactagcagtaggacggaaagaccccataattcttgactagataggtttagggacgagagagaatcatgag

SEQ ID NO: 5017 - DNA, 427 bp, Cyanidium caldarium
  Clone ID: LIB190-053-Q1-E2-D9
cgtcaggtggaaatatcccatcagctttccaaccttctccacgcggtatacgagtgcgaatataccgaggtggagtggctaccttgggtttgttgttcagacactgtcgaaaacgcaatagtatgggaagacatactggtgcttcaaggcgccaaactgctggatatttatgctgaaggattacaactgttcaacaagtttcgtcgtcacctgatgaacgtgtcctttgtgggagacagcaaactatgggattcactatctcgtttcttgctgtttatccaaccgagtcattccacttgttggaactttcgaaagtttctcgttcaacaccatcacgcttcctatcttatggagctaaaagtgagtgaaattgccgttgaagagagatgccacagcaagccaggcttggcaccatagaaagtggttg

SEQ ID NO: 5018 - DNA, 327 bp, Cyanidium caldarium
  Clone ID: LIB190-053-Q1-E2-E4
accacgcgtcagcccaagcgtccgcttttatgaaatggcaagatgctagcaaaaagtcaatcggcttgttcaaggtcatgagtgaataatgtcactggtcatttgatgtaatttcgaatctcatacagtgttggccatttcatagggcaaataatgactaagagtttatcgaaatcattccaccaagggagtaaaggcgcacgaaagaaacccaaagcaattgacgggaatcggaaaaaggggtggatcacgtaaattaatccgataaaccgacaaccggacctctccaacaaagtgttgcacggctgtctacttaacgttcagtga

SEQ ID NO: 5019 - DNA, 362 bp, Cyanidium caldarium
  Clone ID: LIB190-053-Q1-E2-E6
gtcaggagttcccgggtcgacccacagcgtccggacagagctgccacagagctacttgtgaagactgccctcgaagatcacggactgaactttgatcccttagatactgacaaggacctggtatatcctgagaaatattatgagccttgtggaggcgaaatgtggatccttgagcacgataacacagtggttggctgtgctgcctttttgcctattcctgatacgtgtgcggtagagtttcgaaagatgtacttttctccgaacataagacgcaacggttatggaaagctaatacttggagccttagagtatccagcctttgagttgggatacacatagggtacattggaaacgtcgcacct

SEQ ID NO: 5020 - DNA, 451 bp, Cyanidium caldarium
  Clone ID: LIB190-053-Q1-E2-E8
gtcaggagtccccgggtcgacccaagcgtccgagaatggagtggagaaggaagaggagacactagtccaagttcggatccattaacttttaccaaactttatgtgggttctattcacttttctattagtgaagaagatttacgcactatttttgagccttttggggaagtcgtttccttgcagcttcacaaggaccctgaaacgggacgttcacgaggttttggttttgttcaatacagaaaccacgaagatgcgaaaaaggcattggaacaattgaatggacttgatcttgctggtaggcctttaaaggttggtttggcaactgcagagactcagaaacttcaagtaatgggtgctattccttcgggagttcctagtacaatagctgcgaggagcttatcaagtaggggttatagtgcatatattagtgaattggatgaaggtggagata

SEQ ID NO: 5021 - DNA, 409 bp, Cyanidium caldarium
  Clone ID: LIB190-053-Q1-E2-F2
gacccacgcgtcagcccacgcgtccggatttctgtttgacgcgcttcgtgtccccactttcccttttttgtaaatcttcgaaaggctggataggacaagcatcattattcaaggtaactcatgtataggtggaaataaggcttctgtcgaagtttcttataccggaaattttaaagaaagacagtcgtttttgccagcgtcttttgctagaagaagtggctggctccctttgaggctaactgaagaaagctactttggctggccaggaatagtgaatattgccaagagcttattctgttatattgtttctcagttgagagaattttcagcaagctcagcatttgttgcctgtaaaaagggacttgctagaagcaatttatttgactccagagaaaagtttgatatcaac

SEQ ID NO: 5022 - DNA, 459 bp, Cyanidium caldarium
  Clone ID: LIB190-053-Q1-E2-F9
gcggtctagaatttgcgggtcgacgcacgcgtccgaatggacgctcaaggttatgttgtaccttcactgacggtggatgctgcagttgtacgaggtttgaagccagcactagaaattttattggttactagaaagaaagaaccgttccagggtcgcttggcttttcctggaggttttgttgaatatggtgaggatcctgagcaggcagttttgagagaacttgaagaggagtgtggaatacgagggacgagtccttcgctcgttgccgtccgtgggaagccaaatagagatcctaggaaacacgtggtaacaatatgttactatgtagaacccgcacagaaagactctcaggtgaaagctggtgacgacgctgcgtcttgtggttggtattctgtggaaagtcttatgaagagtccagaactttttgctttttgacactacgagttgttgcaacaagtt

SEQ ID NO: 5023 - DNA, 463 bp, Cyanidium caldarium
  Clone ID: LIB190-053-Q1-E2-G1
gtccagaattaccgggccgacccacgcgtcaggacaatggttgcaaagactgctctgagttgcctctttctctctttccttatcgctgccgcagttgcagccgacgtagtttcagaggagagatggggatatgctcagcaaacccaacaacagcaacagtgccaacaagtatgtaaacagtatgcatactatcagagtccagtctgcacttccgtaaccacacagagcccatactggacccaatgctcgaagactgtgcaaacctttgtcccaagccagtgcagtacttatacccaatctcctacatggacctattgcagcacctacaccaccactagcgtaccatctcaatgcagcaaggccgtgactacctatactcaaacctgctgtgcttatgcccaacaaacttcctatgcagtcagtaccgagcaatatgttcaggaaactgtatctgctcaatata

SEQ ID NO: 5024 - DNA, 257 bp, Cyanidium caldarium
  Clone ID: LIB190-053-Q1-E2-G4
cgtcagcccatacgtccgatcttagttccagtgtacgcacccatggttcgtcggagggtttgcatttgtcacgagttggttgcaaagtgtcgcgagtgaggtttcttgaaatagtgcgagaaaacctcattgacgacgtcggctcaaagctcggtttacggcgtgtacaattaggaccatcatttggtccttcaagcatcgcccagattgtaagcacgtttgaagtcgcactgtagttctcagtaatgcagggggtt

SEQ ID NO: 5025 - DNA, 449 bp, Cyanidium caldarium
  unsure at all n locations
  Clone ID: LIB190-053-Q1-E2-G9
ggccgacgcacgcgtccagaaaaaagaagagagctagaaaggaggtgagaaagcataggaagtgaaacggattaggaacccgtgtagtctatgcagtaaaagaaagaatgagtaagaaaaaagggagtcattccaccaggggagtaaaggcgcaagaaagaaacccaaagcaattgacgggaatcggaaaaaggggtggatcacgtaaattaatccgatataaaccgagaaccttacctctccaagaaggtgttgcacggctgtcgaaagaacgtgctgtgaagtgagagaacgtacgagaaagccaagtgaggaaaagaaggcaagtagagggcggcccgagaaaggagaaggcgtaagacgtgatacagagtaggaagaanagagaagagagctaganaggaggtaaaagaagagtaaaaggactagaagaggtacggaattcacga

SEQ ID NO: 5026 - DNA, 440 bp, Cyanidium caldarium
  Clone ID: LIB190-053-Q1-E2-H10
gccgacgcacgcgtccacccacgcgtccgggaaccttcgtattatgtcatcaatgttcggacgcaaagcagagtacaagagagtttttaaagttatggggttcaagtccatattctcgcacgaaacaccgtattctctggaaccagcttcagtttagcaagcgagcagagctccacagaaacgacacttatgcacgtagactatttctaactatggaaaaaggggaagaacagaaatttgcatcaccagaagaagaaagactggcaaagaaacgtgaagaagtggaaagactgcgagccgctgaaaagtttatacgtaaagatgaaggaaaattcggttgtcctgtgtgtgattatgtctacgaaccaagcaaaggagacagtttggctggtatacaacctggaacatcttttgaggctttacccgatagttttcgttgt

SEQ ID NO: 5027 - DNA, 308 bp, Cyanidium caldarium
  Clone ID: LIB190-053-Q1-E2-H5
aattcccgggccgacccaagcgtcaggtcactggaataacaatatattacaaattgcatctgtttggtatgagcgtttcaaagcttgataaagagattcaagttgcttccttttgaaaaaaaaaaaaaaaaaaaaaaaaaaaaaaaaaaaaaaaaaaaaaaaaaaaaaaaagaaaaaaaaaaaaaaaaataaaaaaaaagggtgaatgtaaaagcaaataaaaagcacattaaaaatgaaaataaaattaaagacaatggccataaaaatgaaaattgcggaaaagggaaaacacttaaacaaaacaa

SEQ ID NO: 5028 - DNA, 441 bp, Cyanidium caldarium
  Clone ID: LIB190-053-Q1-E2-H9
attcacgggtcgacgcacgcgtccagtaaaacgagtctcgtcccaggcagagacaggaatatcatatattataaatagatatatatattcatattcaaagatagatagatcttgtttcgtgtaggaatgtctgttcttctctctctccgcttttccgtcgcaaggcatcctagagtttgtccaccactgttgaaaaagtatttttgtgtggaaagcacttcaggccttccaaaaagtgaaactctttcaaccaatgttgcttctagtgacaatagactcaaggtaaatctgttctctacgagttgttcttactggactcttttcagagtagcacggaggaagattctgttcctttgtatcgcaatcgccccggtatccaaccacttcagactccagttggctcgtttaataagcagcaagtaattcccaatgagaatcacg

SEQ ID NO: 5029 - DNA, 416 bp, Cyanidium caldarium
  Clone ID: LIB190-054-Q1-E1-A10
ggtaacggtcaggaattcccgggccgacccacgcgtcagcgtgagggtagttcatcatggttgagacaaaacttcaagatggtgttagtgcttctctttggactgttcgtctcttcctctacacagttattttagcattctctgccactatcattggcttggatggacgtaaagcagacaacatatggaacgacagcttattctatgatgggaagtacattaacttttgtgcttattctgcctcttctgttgtagaaggaggggaccatggagcgtgtaaatatgtcatggcgttggcgtctataagtttgattctagtctttttcttgtggctttttacatttgtagatgcgttgtatcctattcttaccaagttttggtttattgaattgggtatcaacgtgtttcaaacaatg

SEQ ID NO: 5030 - DNA, 400 bp, Cyanidium caldarium
  Clone ID: LIB190-054-Q1-E1-A12
gtcaggaattcccgggctaccttttcggttgtattgaagaatcattttccggaatgtgagcaacaactagagcaatggttggtggatacctgtgggatcaaggaaacgggtgaagatttttatatgcgttggaacgagcaacacatgtcttggttgcaacctttggaagaaagtcaacgacaatggttgcaaagattgtattccacagcaccgattgtacaattgcaagggaagatagaggagttggaagatattcggattcaagtgagttggaaagtatcgctatcctatgataagcaacgcagtctttggtggaatcagaatagcaacaaaagagccagtcgggaaacttggtatattctactgggtaaatacaacactgggaaaataagtgcttttc

SEQ ID NO: 5031 - DNA, 183 bp, Cyanidium caldarium
  Clone ID: LIB190-054-Q1-E1-A2
cccaagcgtccgcccatgcgtccgacaaattcccaaacggagttgagctcgaagacttcaaacggtctttgtcctgcaggaaactatccaaaactaaagcaaagttcttataaaaaaaaaaaaaataaaaaaaaaaaaagaaaataaaaaaaaaaaaaaaaaaagaaaaaaaaataaaaaata

SEQ ID NO: 5032 - DNA, 311 bp, Cyanidium caldarium
  Clone ID: LIB190-054-Q1-E1-A5
gacccacgcgtcagcccacgcgtccgcccacgcgtccgggatgccatccttattggtacaagtagcctattgtattcatgatgtgccacctatatctacctgtgtacgcactatgttctccgagttttggagaagtcatcacgaggaatggcccaaacaaaagcaaatgttgcaagccgatcaaagagaagcgttgaatgaattgctcatcgcaccaagttattatgcttgaatcgttgccctcctccataaaacccatctcgtggcatttttttttaaaaaaaaaacaaaacaaaacataaaaaagcaag

SEQ ID NO: 5033 - DNA, 421 bp, Cyanidium caldarium
  Clone ID: LIB190-054-Q1-E1-A6
ggtaccggtcaggaattcccgggccgacccacgcgtcagcccacgcgtccgcccacgcgtccggaaagaaagaaagataagtgaatatcatatggtggatgtgagtccatggccaatactgacagtagtagcattgatgggaatattgataggaatgatagagtggatgcattcgatgggtaagaggatattgataatgggagtaataagtatgttgatgagtatgtatggatggtggagggatgtaataagggagggagtattagaaggtccaaacaagagaagtcagcagtggggaaaattgggcaatgtacagggaagtatgacccagtaatgaggagtggagtaaacagaaaaggaagtaaaaggagggaatgaagggaagttatggcaaaaacacgtgccagcagcagcggtaaaa

SEQ ID NO: 5034 - DNA, 412 bp, Cyanidium caldarium
  Clone ID: LIB190-054-Q1-E1-A7
ggtaccggtcaggaattcccgggccgacccacgcgtcagcgttgtctcgagacgtaatttgtcgatggcaatgtctactaccaagccaaaagtacttgcgttgtatcgacatatgttgagatgtattaaaactttacccccacaagtacagccttactacagatactatgtgagacaagtatgtttttttgtttgttgttcaacactcgttctctcttacggtactttagcaattcaatagtcacgcagacgagatagaagaagaaagagtggaagaaatcatatccaagtctcgttcttatattccgtatatattagacaaggtaagtttgtgttttatttgctgtgaatatttctcaaaagacttgcacagtacaatagtaaaccacctagctaagactttcgtggacgt

SEQ ID NO: 5035 - DNA, 415 bp, Cyanidium caldarium
  unsure at all n locations
  Clone ID: LIB190-054-Q1-E1-B1
ccggtccggaattaccgggtcgacgcacgcgtccgtgctttttgtacggttgacaattgtcgtcaatcaccttcgggatatgatcaacgagtggaagtttttggttccaaaggcctcgttcgttttgggaacaactttcccaataatgtctttattgaagatgcgcagtccgttcgaagaagtgatcttccctttaacttctttatggatcgttataccgaagcttatcgtaatgaaaccaaacagtttgttcaatgtgtcttggaaaacaaagaacctccgacaagtggtcgagatggaactgctgcaatggcaatggcaattgctgcaaaaagagtttgttggggaaaagaaccgttaaaacttacgaaaattaccccttngaaataataaaatggtgggtttatccanttcg

SEQ ID NO: 5036 - DNA, 406 bp, Cyanidium caldarium
  Clone ID: LIB190-054-Q1-E1-B10
aattcccgggccgacccacgcgtcaggtgggaaacatgtcgaagaagccttctggaagactttattgtaaaggggtagtgttgggttataaaaggtcacaacggaatcaatatcctagtcaaaccagaatcaagatacagggagttgaagatcgagcttcgacagcgttttatttaggaaagcgtgtggcatatgtttaccgtgcaaagagaccaagaaagagtgttggaggaaagaaaacaaagattcgagtgatttggggaagaattattgcaccacatggtaatagaggagtagtacgtgccaagtttcgaaacaacttgccaccttctagttttggcaaacgagtaagagttatgttgtatccaagcaacgtataaacaagtgctttaaaattttaatcttt

SEQ ID NO: 5037 - DNA, 254 bp, Cyanidium caldarium
  Clone ID: LIB190-054-Q1-E1-B7
acccacgcgtcagatcgttgttgagatatgcgaacatccatcacattcacttgttggacaccgttgcatcgaacttcattgaacgtaatttgctcgtctagtttttgcctaaacaactctattccgtaccacgctaacaacataaggagttgtgtatttccgcagaccatttatggaacacctgtcgagatgcacaagctagaagtggatgcaaaccagatgcgaatgcattttggatcagttcccaagcaggt

SEQ ID NO: 5038 - DNA, 415 bp, Cyanidium caldarium
  Clone ID: LIB190-054-Q1-E1-C1
gggtcgagccacgcgtccatggaagaagagtcttatatcgatcccgatttatccaaagttgcgaaagaagaaggaaataatttgtataaacaaggccaatttccagaagccctgcagaaatatacggaagcaatcaaacgcaatccaaaggatccagttccttatagtaatagagcagctactttgaccaaactaggacaattcccttctgctttagcagattgtgaaaaatgtttgcagctagatcctcaatttgtaagagcttatgccagaaaaggtgctattcatttctatatgaaagaatatcataagagtttggatgcctatcaacaaggacttcaagtggatcctaataatgcagaattgaaagaaagattgcagaaaactttgagtgccaattgcaaacaacaacgct

SEQ ID NO: 5039 - DNA, 336 bp, Cyanidium caldarium
  Clone ID: LIB190-054-Q1-E1-C10
ggtaacggtcaggaattcccggggtggaccgcaaatacaagcattcaagcacctctttattggatatcatttctatggacaaggtagaagaactaaagtcactggtcaattccgtggaagaagactgcaataaattttttgagaacggaaacaagtcagctggagttagagcaagaaagaacttgcaagaaatcaaaaaacttgctcaagaactacgcatagagatacaagcgacgaaacaaactgaaaagtgatactttcaactgtgcagaatcaaccatggcttgtgaaactattccagtttttcaaataaataccttttttcgtttgtaaaag

SEQ ID NO: 5040 - DNA, 390 bp, Cyanidium caldarium
  Clone ID: LIB190-054-Q1-E1-C11
ccgggtcgacccaaacgtccgcccacgcgtccgattctgagtaaaaaagagccgggttacttcacgaaagaacatcggaaatgccgctcgacggaaatataattttcattgttgggaatcgattttgcgcaacctttgcatcccctaatggttggtagagacggcggaaaagcgaagcctttgaagaagccaaagcctacttcgaaggaactgacggaggaggatttggaatttaagaaaagacaaaaggaggagcaggccaagttgaaagcagctcaacagcagttgaaaggaaagggcaagaagtgactttgcttctacgagttagctaaacaaacgctttatttgtttctacaactattcgggtactttttgatagtttccgtgaac

SEQ ID NO: 5041 - DNA, 334 bp, Cyanidium caldarium
  Clone ID: LIB190-054-Q1-E1-D1
ggtcagaattaccgggtcgagccacgcgtccgtgcaaacgtccgatgaacctcacaaggttggcagtaatggagcatttcaagaatttacaatgcttggttgactatcaacacattgataggtgaatacatggtaatacataggataagtttacaaaagactcaagtccatcgaatagaatcctagtggcatcaacattgacatccgattggattctggtaacatatatagatcaaatttcattggaaaacagccgtactgatgaccgatacacgtacatccagatatcggcgacccactttaaagttagatattggtcgataaggaactaggc

SEQ ID NO: 5042 - DNA, 417 bp, Cyanidium caldarium
  Clone ID: LIB190-054-Q1-E1-D11
ggtcaggaagtcccgggtcgacccacacgtccgattcattgcggatcgcgtttggggcttgtaacagtcaccatgaagtattcccaagttgtatcgtcgtctagaagaaagcagaggagagcatacattcaagcaccatcgtctgtacgacgaatactcatgagtgcatccttgtccaaggaactacgtatgatatacagggttcgttctttacctatgcgataagaagacgaggtaatgatagtacgcggagctttcaggggtagagatggacaagtcacaacgtgttatcgagggaaatatcggatacagatcgagagagtgaccagagaaaatgcgaatggaatgactgtagctgtgggaagacatccatcgagtgttgttagtaccaggtgaaagttggacacggacaagaat

SEQ ID NO: 5043 - DNA, 327 bp, Cyanidium caldarium
  Clone ID: LIB190-054-Q1-E1-D12
gtcaggagtcccgggccgacccacgcgtcagattctgtgcgaggagcgtgaggggcatgtagtaatgaccatgaactattccaaggttggatcgtcgtctagaagaaagcagaggagagcatactttcaagcacgatcgtctgtacgacgaatactcatgagtgcatgcttgtccaaggaactacgtatgatatacagcgttcgttctttacctatgcgatcagaagacgaggtaatcatagttcgcggagctttcaggggtagagatggaccagtcccaacgtgttatcgagggaactatcggatacagatcgagagagtgacccg

SEQ ID NO: 5044 - DNA, 379 bp, Cyanidium caldarium
  Clone ID: LIB190-054-Q1-E1-D2
acgcgtccacggaagcgtgggttttgcacaaaatattcgacgtcgccattgagcagccgtgatgggacgtgtaatacgaggccagagaaagggagccggtagtgtatttcgtgcgcatgtcgtcgaatgaaaaggagcagccaagtttagagcgttggattatgccgaaagacacggatatctaagaggagtcgtcagggaaatcatatacgacccaggaagaggagctcctttggctcgagtggaatttagggatccgtatagatatgagagaagagtagagacttttagtgcaccagaaggtttatatacgggacaattcctgtactgtggaaagaaagcccaactaagcaatcggtaaagtccttccacttggttc

SEQ ID NO: 5045 - DNA, 392 bp, Cyanidium caldarium
  Clone ID: LIB190-054-Q1-E1-D3
acgcgtccacttttatctcttgtagcacaaacacaaattaaagaacaatgcgtgaggttatttctctacatattggtcaagcaggtgttcaagtagcaaactcttgctgggaactttattgtttagagcatggtgtcaacgctgatggaaccattgataaaaagggaaacacagcaaacgaagaagcttttggtaccttctttacccagacaagctcgggacgatatgttcctcgttgtgtacttgtcgacttggaaccttctgtcgtagatgaagtccgtacaggtgcctaccgccatctctatcatccagaacaacttatttccggcaaagaagatgctgcaaacaattatgcaagaggacactatactatttgaaaagaaataatcgac

SEQ ID NO: 5046 - DNA, 306 bp, Cyanidium caldarium
  Clone ID: LIB190-054-Q1-E1-E1
ggtcaggaattaccgggccgacgcacgcgtccacccacacgtccgcccacgcgtccgagagtttattcatttacctggcgatgtgttttccaatccgcatccaatgcaggctataggacaagttcctgttgctggctgggtacaaatatttcttcttgttgccattcttgagatgatagacatagcagctattaaggaaaccctccagggaaatagagagccagggtatttcggctttgatcctctgggtttggcaaacgacaaacaggctcatgatcgatatcttttgtcacaactgaagaatgg

SEQ ID NO: 5047 - DNA, 209 bp, Cyanidium caldarium
  Clone ID: LIB190-054-Q1-E1-E5
ggtaacggtcaggaattcccgggccgacccacgcgtcagaaaaaaaaaaaaaaaaaaaaaaaaaaaaaaaaaaaaaaaaaaaaaaaaaaaaaaaaaaaaaaaaaaaaaaaaaaaaaaaaaaaaaaagggcggcggcccgacaggctccaggcttaaatcctcgttcatgctacatcaaacctcttctatcttgtcacctaactccaatt

SEQ ID NO: 5048 - DNA, 188 bp, Cyanidium caldarium
  Clone ID: LIB190-054-Q1-E1-E8
atcactttttcctacactgtatcacgtcgtacgccgtatcaaagaaggtgttgcacagatgtcaacagaaagtgatgttacatgagaaaacgtaacaaatacgacagtgaagtctggactgcaagtaaagttcagcggaacagatgaaagggcgtactacatcattcacaatacagcgtaccgtcctg

SEQ ID NO: 5049 - DNA, 446 bp, Cyanidium caldarium
  unsure at all n locations
  Clone ID: LIB190-054-Q1-E1-F10
gtcaggagttcccgggtcgacccaagcgtccgcgttccgattgcaattgcacttgaagagatttgtgtggttcctagttgttagtgtttgtgtggatgttttatggggaaccaaaactcctctggagtattttcaccggaaatgtcttatcgtataggaggtactagaagtggttccgaaacttttcgtaaccacagtgatgcttctttctccaacaaccaaccctttgtagacaatgtatatgtttttgaaactcctcaaggagtggcagcaacaaacaatataccttttcactcttcagaaagaacatatcggggacagaggtccgtttctagggccaatcttgtcttggaaggtcagcctccaagtaaccaacagctgccttctcaacaacaggttagttgatgtatgccttgctcncttcgatagtttctgatatatatata

SEQ ID NO: 5050 - DNA, 403 bp, Cyanidium caldarium
  unsure at all n locations
  Clone ID: LIB190-054-Q1-E1-F3
gggccgacccacgcgtcaggttcgttcagatctccgcagcttaacgattattgtggatttttgttgcaaggtctctttataagaaaagactaggattagtttatacaaacgacagcaaactttgtatctttttgttcctgggtaaattttttatctcctagtgggttgttagctangaaaagggttggtttaaagctgtgttaccttgagaaggtaccaaatatccactcctcgtactagtctgtttgtaaggcttactgggagaaacttggtgaaacttttcacttgtatgttgtgcttggtcgcctcacagtcgaataggctctgaacctggtgaagctattttgagtaaagagaccgatagtaaaagagacagtcccgcaccctcatggagaaatgcttc

SEQ ID NO: 5051 - DNA, 398 bp, Cyanidium caldarium
  Clone ID: LIB190-054-Q1-E1-G12
ccgggtcgacccaagcgtcagattttgggtctcggacatcgaacattccctcaagtgagagatattgcaggaatgtgaaaaattgactgtcccagagttgaacatagcaacgtatcaaccatctggcgaacttttgatggtcatggtacttatcgaaagaatctcgagactaaccttcgtacaatagatatcgcagattctagctggtattatgcaagtgcagaggaagatacctccatgtcaatctgtacagaaaatccccaagcagataattcactagcttcgaaacttgagttcaagatatgttgttgagttacgttactctcgtcgattttccgagattccatattggatgatcgagcgattggatgtgcatagagacgctgtactccaggctc

SEQ ID NO: 5052 - DNA, 122 bp, Cyanidium caldarium
  Clone ID: LIB190-054-Q1-E1-G2
gcgtcaaatcggacacaggagcatcggacttcatgggtgtaggaaccgagtcagccagaacaaatgacacggaattactgagggacgctgacggttacgcaccaaagtgaaacggtagtcga

SEQ ID NO: 5053 - DNA, 392 bp, Cyanidium caldarium
  Clone ID: LIB190-054-Q1-E1-G9
ccgggctcgacccaagcgtcagagcggatgcagaaattgcagttcgtaatggagtagctggtattattgtgagcaatcatggagcaagacagttggatacttctcttgccactattgattgtttggaaaaagtacttgcaggtgcacaaggcaaagttcctgtgtttgtagactctggagtacgtcctggtacagatatagtgaaaagtttggcacttggtgctcaagctgtacaaattggtcgtggtgtcttgtgcggtttagcagttggtggggaataaggtgtggatcgagtgttgaagttgcttcgtgatgagtttgagttggtactgggactttgtggctgtcatagtgtcaaagatattcgtagagatatggtaatcagaaacaca

SEQ ID NO: 5054 - DNA, 368 bp, Cyanidium caldarium
  Clone ID: LIB190-054-Q1-E1-H10
ccgggtcgacccacagcgtccgcggacgcgtgggcggacgcgtgggcggacgcgtgggttcctagtggtatgtttacagaggagattgatcgatatactggtttcgagcaaggagctatcaatttaacttggagttatgatgcctttgttactgcggtttggtcaagagaagatgttcacaagttgttttctaaatattgtgaacctccttctccacctctacctagtatgccaggacctggtggtttatcttctccataataagaggcacttgtgcactttggatatttttgtggttcacataaagacaagctttattaagaagcacacagaagaaaaaatcagtacaattgtaacacaatcgcaac

SEQ ID NO: 5055 - DNA, 409 bp, Cyanidium caldarium
  Clone ID: LIB190-054-Q1-E1-H2
gggccgacccacgcgtcaggtgggaaagaggacgttggacgggcattgtggaagagcgttttggttcctggatagctcatgtggcgaacaactcttgtcgccttgtaaagacgataccctatacacagggtaatgcaaaaaagttttgccgatcaagttgcacaatcgacatacacaaccatacgtgggtttgccacacctacacatgcccttcgatacgacgcccacgtggctatggtaatgttcccagcatctactgcaatgaatggcgtacttcctcaacatgtgcctacagctgctcaactgaaacctgcagtggtgactgtcctagaatatggcacagatgacaaatattttgtgagtagtggatttgcctttgctaccaaagcacgaatagatattttggctg

SEQ ID NO: 5056 - DNA, 264 bp, Cyanidium caldarium
  Clone ID: LIB190-054-Q1-E1-H3
cccacgcgtcaggacttggtaaaataaagcaaggagatccactcaatttggagactatggtgggagctcaagtatctactgaacagatggataagattcttcactatgtggaattgggaaagaaggaaggtgctcagtgtattgttggatgaagtggaaagaaagctattggacgtgatttcaaaggtggctattacattgaaccgacaatattcaagggagataacaggattagaatattccaggaagagatatttgggccat

SEQ ID NO: 5057 - DNA, 436 bp, Cyanidium caldarium
  Clone ID: LIB190-054-Q1-E2-A10
aattaccgggtcgacgcacgcgtcagcgtgagggtagttcatcatggttgagacaaaacttcaagatggtgttagtgcttctctttggactgttcgtctcttcctctacacagttattttagcattctctgccactatcattggcttggatggacgtaaagcagacaacatatggaacgacagcttattctatgatgggaagtacattaacttttgtgcttattctgcctcttctgttgtagaaggaggggaccatggagcgtgtaaatatgtcatggcgttggcgtctataagtttgattctagtctttttcttgtggctttttacatttgtagatgcgttgtatcctattcttaccaagttttggtttattgaattgggtatcaacgtgtttcaaacaatgtggtggttggttggagcaattgttgtatctgca

SEQ ID NO: 5058 - DNA, 219 bp, Cyanidium caldarium
  Clone ID: LIB190-054-Q1-E2-A2
agtacggttagaatgccgggtcgaccctagcgtccacgcacgcgtccgcccaaacgtccgacaaattcccaaacggagttgagctcgaagacttgaaacggtcggtgtcctgcaggaaactatccaaaactaaagcaaagttcttataaaaaaaaaaaagaaaagaggaaaaaagaaaaaaagaagaaaaaaaaaaaaaaaaaaaaaaaaggggaaaaa

SEQ ID NO: 5059 - DNA, 366 bp, Cyanidium caldarium
  unsure at all n locations
  Clone ID: LIB190-054-Q1-E2-A3
cgggtcgacctaggcgtccgacggcgtaagacgtgatacagagtaggaagagaagagaagagagctagaaaggaggtagaagaagagtggaaggactagaagaggtacggaattcacgacgaaggagcgtgaaggaaggaggaatcccaagtaatcgaggaagaaaaagcttcggtgaaagcgtgaacggatttgtggtacacactgcccgtcaagttctggaagtgtgctangaataagcaggagaagtagaagaggagtaggagggcgggaggggaggtggagacgtaagacgtgaaaaaaaagcgtaagacgtgagacagagtaggaagaaaagagaacagagctagaaaggaggtaaaagaa

SEQ ID NO: 5060 - DNA, 436 bp, Cyanidium caldarium
  Clone ID: LIB190-054-Q1-E2-A6
ggtaccggtctagaattcccgggccgacccacgcgtcagcccacgcgtccgcccacgcgtccggaaagaaagaaagataagtgaatatcatatggtggatgtgagtccatggccaatactgacagtagtagcattgatgggaatattgataggaatgatagagtggatgcattcgatgggtaagaggatattgataatgggagtaataagtatgttgatgagtatgtatggatggtggagggatgtaataagggagggagtattagggtggtcgaggcgagggaagtcagcagtggggaaaattgggcaatgtacagggaagtatgacccagtaatgaggagtggagtaaacagaaaaggaagtaaaaggagggaatgaagggaagttatggcaaaaacacgtgccagcagcagcggtaaaacgtgtgtagcaagc

SEQ ID NO: 5061 - DNA, 412 bp, Cyanidium caldarium
  Clone ID: LIB190-054-Q1-E2-A7
ggtaccggtcaggaattcccgggccgacccacgcgtcagcgttgtctcgagacgtaatttgtcgatggcaatgtctactagcaagccaaaagtacttgcgttgtatcgacatatgttgagatgtattaagactttacccccacaagtacagccttactacagatactatgtgagacaagtatgtttttttgtttgttgggcaacactcgttctctcttacggtactttagcaattcaatagtcacgcagacgagatagaagaagaaagagtgggggaaatcagatccaagtctcgttcttatattccgtatatattaaacaaggtaagtttgtgttttatttgctgtgaatatttctcaaaagacttgcacagtacaataataaaccacctagctaagactttcgtggacgt

SEQ ID NO: 5062 - DNA, 420 bp, Cyanidium caldarium
  Clone ID: LIB190-054-Q1-E2-B1
aggtagagcgttaagaaggcacgggtcgacctacgcgtccgtgctttttgtacggttaacaattgtcgtcaatcaccttcgggatatgatcaacgagtgggagtttttggttccaaaggcctcgttcgttttgggaagaactttccgaataatgtctttattgaagatgcgcagtccgttcgaagaagtgatcttccctttaacttctttatgggtcgttataccgaagcttatcgtaatgaaaccaaacagtttgttcaatgtgtcgtggaaaacagaggagcgccggggagtggtggagatggaactgctgcaatggcaatggcaattgctgccaaaaagagtttgttggagaaaagagccgtaaaacttagcgaaattactccttaagaataataaaatgttggtttaatctagtcg

SEQ ID NO: 5063 - DNA, 411 bp, Cyanidium caldarium
  Clone ID: LIB190-054-Q1-E2-B10
tcaggaatttacggctcgacgcacgcgtcaggtgggaaacatgtcgaagaagccttctggaagactttattgtaaaggggtagtgttgggttataaaaggtcacaacggaatcaatatcctagtcaaaccagaatcaagatacagggagttgaagatcgagcttcgacagcgttttatttaggaaagcgtgtggcatatgtttaccgtgcaaagagaccaagaaagagtgttggaggaaagaaaacaaagattcgagtgatttggggaagaattattgcaccacatggtaatagaggagtagtacgtgccaagtttcgaaacaacttgccaccttctagttttggcaaacgagtaagagttatgttgtatccaagcaacgtataaacaagtgctttaaaattttattcttt

SEQ ID NO: 5064 - DNA, 436 bp, Cyanidium caldarium
  Clone ID: LIB190-054-Q1-E2-B12
aattaacgggctcgacgcacgcgtcagagacgaaaagcaaattcccgcgcctattcgttcagaaacaactttagaagatgaacttgtcttagatgcaccagcacaaaagacattaaacttatataaagtagataattatacttttggcacgaagcagtcatcccaaaaacaacacgaaagaaatccacagcgtttaaaggaaaaatatcaagaaaggggtttgaggcactctgttgcaggagtacttcttgtacatcaccatcgacatccgcacgttcttgtattacaacaaaccaaggactctggaagtttttggcttcctggtggccgtttgcgtccaggtgaaggtgacttggaaggtttatcgaggaaactagataatcgcttaaggagtccctcacaagagaagggcagctgggaaataggagactttttg

SEQ ID NO: 5065 - DNA, 431 bp, Cyanidium caldarium
  Clone ID: LIB190-054-Q1-E2-B3
aggtagcggttcagaagtcccgggtcgacccaggcgtccgcccacgcgtccggataaatatggaatcctggaaggtttgatgacgaccgttcatgcaactactgccacccaaaagacagtagatggaccttctcacaaggattggggaggaggaagaggaattttgaataacattattccatcttctactggagcagccaaggctgttggtaaagttattcctgaactgaatggcaagttgacgggtatggctttccgtgttccttgtccggatgtttctgtcgtcgatgtcacgtgtcgtttaaagacaccaaccacttatgacgatttcaaggcaacgatgaaagctgcgtcagaaagcaaagctttaaagggaatattggcatataccgaagatatggtagtttctactgactttgttcacaatagtc

SEQ ID NO: 5066 - DNA, 393 bp, Cyanidium caldarium
  unsure at all n locations
  Clone ID: LIB190-054-Q1-E2-B9
gcgtcagtgatgagctgttccaacggcaaaagagaaacgagctctagtgcaacactgaatgacctttaaggcttgatttttccgattatcatactaaacgctgattttacacacaactcacgagaaattgatattagagtcgacgagaaagaaacatattgagaactgatgttaatctgtctagctgttggcaataagacaagctacggcgtctttccaagtttctttcaactcttataaacaaaacaagtaaaacgcctattcactactggtaaagtcttttctttcgataaaaaaaaaaaaaaaaaaaaaaaaaaaaaaaaaaaaaaaaaaaaaaggaagaagggcggnaggtctaaaggatacatgcttacgtatgcgtgcatgcaacgt

SEQ ID NO: 5067 - DNA, 443 bp, Cyanidium caldarium
  Clone ID: LIB190-054-Q1-E2-C1
tagcggttaagaaggcccgggtcgacccaggcgtccgtggaagaagagtcttatatcgatcccgatttatccaaagttgcgaaagaagaaggaaataatttgtataaacaaggccaatttccagaagccctgcagaaatatacggaagcaatcaaacgcaatccaaaggatccagttccttagagtaatagagcagctactttgaccaaacgtaggacaattcccttctgctttagcagattgtgaaaaatgtttgcagctagatcctcaagttgtaagagcgtatgcgagaaaaggtgctattcatttctatatgaaagaatatcataagagtttggatgcctatcaacaaggacttcaagtggatcctaataatgcagaattgaaggaaggattgcagaaaactttgagtgctattgcagaacaacaacgctccgagaaac

SEQ ID NO: 5068 - DNA, 323 bp, Cyanidium caldarium
  Clone ID: LIB190-054-Q1-E2-C10
aattctcggcgtggagcccaaataaaagcatacaagcacctctttattggatatcatttctatggacaaggtagaagaactaaagtcactggtcaattccgtggaagaagactgcaataaattttttgagaacggaaacaagtcagctggagttagagcaagaaagaacttgcaagaaatcaaaaaacttgctcaagaactacgcatagagatacaagcgacgaaacaaactgaaaagtgatactttcaactgtgcagaatcaaccatggcttgtgaaactattccagtttttcaaataaataccttttttcgtttgtaaaaa

SEQ ID NO: 5069 - DNA, 185 bp, Cyanidium caldarium
  Clone ID: LIB190-054-Q1-E2-C11
attcacggctcgacgcacgcgtcagcccacacgtccgattctgagtaaaaaagagccgggttacttcactaaagaacatcggaaatgccgctcgacggaaatataattttcattgttgggaatcgattttgcgcaacctttgcatcccctaatggttggtaaagacggcggaaaagcaaaccctt

SEQ ID NO: 5070 - DNA, 353 bp, Cyanidium caldarium
  Clone ID: LIB190-054-Q1-E2-C3
cgggtcgacctacgcgtcgagacaatattcacaacgcactccacccaacaagactgttcacttcaggggagctttgtgagtggttcgggagagtattcactggtttcttcatagcggtgcagtttttggcctctttgtgtgtagtctctgaggaatggggcttcctcgtcggcgtaaggtttcgtcaacattgagggattgtccgaatattttgttgcttgctcgtgccgttggaactggaatagttcgtgctggtggagcggggtgggcgggtcgggggtgcttatgaacacagctgcctatgttggtttgaaaggtttgacttttgttgtgtcggcttggccgccttatgt

SEQ ID NO: 5071 - DNA, 224 bp, Cyanidium caldarium
  Clone ID: LIB190-054-Q1-E2-C5
ggtaccggtcacgaattcgcgggccgacgcaggcgtgaggcttgagcggcagagcaatggtttctgggcagccttggaacgaggggacgtgtgacttggttcaaaatatgtttcgggaaacgacccacgggaatgtttctagttatcgcgagggatgttgagggctacagaatgagcaaagtgtctgctcaagtcgtctgggtaaaaccccatagattttccaa

SEQ ID NO: 5072 - DNA, 439 bp, Cyanidium caldarium
  Clone ID: LIB190-054-Q1-E2-C7
gtaccggtcaggaattcccgggccgacccacgcgtcagcccacgcgtccgcaagaacagtgggtgctttgtaccatgtcgttctgtccttacaagtgaatacgttcctatggttatctggactcattctggcagttgtaactattcttcagagcctagttatgtatagaagctcaactatagaacagaaggtgtccgctaaacaaaagtcttcaaagaaagaccccagaaaagaacaaggagtttcaggttgtcctttgacgtggggtccaagggaagcaggcattcaactacgccattcggttcacagctatggtttccttcttcatctttgaactgatcacatacaaccggtagaagcgatgggagtcgagacaagctagaaaaaggaactcgcaacaagtcaaaggccacaaataagttgttatctgataaactgt

SEQ ID NO: 5073 - DNA, 435 bp, Cyanidium caldarium
  Clone ID: LIB190-054-Q1-E2-C8
ggtaccggtcaggaattcccgggccgacccacgcgtcagcgccctccatatttcactttacagacccaaaggagacctgctatggcctcatcgtgccacttcccaaaaggcgttttccagagtctgccaggtaagtttcaagtgcgttatgggtgcgagcgttcatcctccaaagtctctttatataatacttattggggtttgaaaataaactactctcgagtggcagtaacttggatacttgctgcaaccatgtgttcgacgcgagctcggggtcgcgggttttgataatactgcgtggttttgcgaagctgaagggatagaacgtgatttaggcaaagttggcggtggtgcagcaagctcggggaaaacctctactggtgtatctcggactgtaactagaggagtgaacctaagtggagcagatttttcggg

SEQ ID NO: 5074 - DNA, 411 bp, Cyanidium caldarium
  Clone ID: LIB190-054-Q1-E2-D1
agtacggttagaatgtccgggtcgacccatgcgtccgtgcacacgttggatgaacctcacaaggttggcagtagaggagcgtttcgaaaggttacaagtctgggtgtgactatcgacacttgatagggaatacatggtggtggcataggataagtttacaaaagacgcaagtcaatcgaatagaagcttagtggcatcaacattgtcatcgggttggattctaataccatatatgagatcaatgtctttggaaaacagccattattaagagcgatacggggacgtccacgtgacgggagacccactttaaagtgtgatattggtcaagatggaactaagcaagaagatattgcaactaccggattacatatggaataagcagcaactactgttttccaaacaactaccact

SEQ ID NO: 5075 - DNA, 438 bp, Cyanidium caldarium
  Clone ID: LIB190-054-Q1-E2-D10
aattaacgggccgacgcacgcgtcagatcaaatgtgtgttacctcgagaaacgtatatccacaattccttttctactctccaaggagtgtaccaagaaaaaccgtaaacaagacaactcaactcaattctgccaaacgaacgagtcctttctgcagtaactttgaagaatctgaagctctgtgactgcgcacggtcacgagacttgtatgaaaagtactagctcaaggttactactggaacaaaacaatactgcaattcacttgttcgatccattgcttgcaagcaacttacgagtcaaacagcgactcgaagaggcaccaacgttactattcttgcaagaatagatatcgcctagtgcaacaacataagtatatattggtatatttgcaattttatttcgtcaaaagatgctatatttacttacaaggacaaagtca

SEQ ID NO: 5076 - DNA, 433 bp, Cyanidium caldarium
  Clone ID: LIB190-054-Q1-E2-D3
gtagcggtttagaatgtccgggtcgacccaggcgtccgcttttatctcttgtagcacaaacacaaattaaagaacaatgcgtgaggttagttctcgacatattggtcaagcaggtgttcaagtagcaaactcttgctgggaactttattgtttagagcatggtgtcaacgctgatggaaccattgataaaaagggaaacacagcaaacgaggaagcttttggtaccttctttacccagacaagctcgggacgatatgttcctcgttgtgtagttgtcgaggtgggggcttcgggcgtagatgaagtccgtacaggtgcctaccgccatctctatcatccagaacaacttatttccggcaaagaagatgctgcaaacaattatgcaagaggacactatactattggaaaggaaatagtcgaccttactttggag

SEQ ID NO: 5077 - DNA, 308 bp, Cyanidium caldarium
  Clone ID: LIB190-054-Q1-E2-E11
aattcacggctcgacgcacgcgtcagatacaattgacggaaacatttactaccaaaaatattctttctgcagccattagtattcctccttgtgacaaggaatgtaataataatgacgagaataacaattagaggttatcccaagtttccgttctcttttcttcctctttcatttgttccttgattctttccacaattagattggaaggggctaagaaatagaaaatagtttctattccattcttcagtcgagaattgggaatatgtggttctataccgatataaagatgaccaagaatggataagaac

SEQ ID NO: 5078 - DNA, 423 bp, Cyanidium caldarium
  Clone ID: LIB190-054-Q1-E2-E12
gacgcacgcgtcaggctctaggtccaactccttgggtggttgcttcagaaatttatccaacctatttacgtagtcacggaatgttgctatctgatgttacaaactttacaggcaactttattactacatacgcattcaaacatatgaccaatgcaatgacgaatacaggtacctttgttggtttctatggaggtcttactattctcggttggatgtatctcatgttctttatgccagagaccaaagacaagactctggaagaattgaatgaagtatttgaaaggccgacgatggacatttttagagaaaatgtggtccgagtgaaagaaacttgcaatgatttgattcacatgcgttggagaaatatttgggtcttatccaaatagacgtgtttttcccgtttgttttgaataaagttgcgta

SEQ ID NO: 5079 - DNA, 443 bp, Cyanidium caldarium
  Clone ID: LIB190-054-Q1-E2-E7
ggtaccggtcaggaattcccgggccgacccacgcgtcagcccacgcgtccgagtttggttgttttcttgggagcagttgtacattcaacatcatcaaatgccaaagggaggaaagaaagattcttcaaagaaagaagccacaagtaaacctgcagcagcagatgctacaaagacgacagaaaagtctggtccggaagccaagttgaagggaactggtgcaaagaaacaataaaaagttgactatgcatgtgcagtcctgttatgttttgtgagttctgtttgatagtttccagctattcttttggtagtgaataaagagaaaattttttataaaaaaaaaaaaaaaaaaaaaaaaaaagaaaaaaaaaaagagagaaggagaaaaaagaaaaaaagagaagaaagaacaagggagcagggggaaggcaaaaaaaaaggggggg

SEQ ID NO: 5080 - DNA, 428 bp, Cyanidium caldarium
  Clone ID: LIB190-054-Q1-E2-E9
aatttgcgggtcgacgcccgcgtcagtttggaatgtttggcataagaaagctcccatgcagaattatctcttacacaacacaaaattctgttccgagtttggaatgcaatcgctttgttcggtagagacatgtcgtttattcgcaccggaatcagaaatgaatatgtttaattccatatttgaaagtcaccaaaagaacagagcaggcaacgaaatcatgttgcattatatttttcagttgttccaatttcctcgctcatacaaaagtttatcctatctttcacagctgaatcaagctctatgtatgaaatgtggcgtcgaacactttcgtagacaaatgccgttttgcatgggctctctttactggcagctgaatgattgttggccagtgactagttggagtagcatagaattcagtggtcgctgga

SEQ ID NO: 5081 - DNA, 429 bp, Cyanidium caldarium
  Clone ID: LIB190-054-Q1-E2-F1
aggtagcggttaggaatgcccgggtcgacccatgcgtccgagactattccggtggaatgaggaggcggttaagcgttgccgtttcgcttattggattgccttcggttgtgttattggacgagccttccacaggactagatccagactccaaacacaagctgtggcaatgtatccaacagagaaaagagggcaaaactattgttttaacgacacactccatggaagaagccgaaagactgtgtgatcgtaccggtattatggccagtgcaactttggaaggtgtgggtccgccagaggaactgaagattcgtcttggaaaaggcttccgtctgaatatttcttgtccaagaagacgcgttaaacaagttctttcgtttatagaacaacagtatgcagatgcatttttggaccattccttagcgggtaatg

SEQ ID NO: 5082 - DNA, 434 bp, Cyanidium caldarium
  unsure at all n locations
  Clone ID: LIB190-054-Q1-E2-F10
aattcacggctcgacgcacgcgtcagcgttccgattgcaattgcacttgaagagatttgtgtggttcctagttgttagtgtttgtgtggatgttttatggggaaccaaaactcctctggagtattttcaccggaaatgtcttatcgtataggaggtactagaagtggttccgaaacttttcgtaaccacagtgatgcttctttctccaacaaccaaccctttgtagacaatgtatatgtttttgaaactcctcaaggagtggcagcaacaaacaatataccttttcactcttcagaaagaacatatcggggacagaggtccgtttctanggccaatcttgtcttggaaggtcagcctccaagtaaccaacagctgccttctcaacaacaggttagttgatgtatgccttgctcccttcgatagtttctgatata

SEQ ID NO: 5083 - DNA, 434 bp, Cyanidium caldarium
  unsure at all n locations
  Clone ID: LIB190-054-Q1-E2-F11
aattcacgggtcgacgcacgcgtcagcccacgcgtccgcccacgcgtccgcccacgcgtccgcccacgcgtccgcccacgcgtccggccatttttcttgtggaaagcgttcgatagaaaaatgccaagagttgttttggcgccttgttaatactcgttggtacatatataaattatgaataaagaaaatctccaaatagcgcaatttgagagactcacaacagagcaaatgcttaatctggtgaaagaaccttctaggggtttgtactacacagtcgaacacttgaggaaacganggatacctcgtctggttcgcgaacaagagaaactcgacacagttattagtaaggaggacgacctcaagatagactgtcagtttgtacaggagacgatggaaatgtttcctgcagctgcagaaaggtttgactcgattat

SEQ ID NO: 5084 - DNA, 426 bp, Cyanidium caldarium
  Clone ID: LIB190-054-Q1-E2-F3
aggtagcggtctagaatgtccgggtcgacccaggcgtccggttcgttcagatctccgcagcttaacgattagtgtggatttttgttgcaaggtctctttagaagaaaggactaggattagtttatacaaacgacagcaaactttgtatctttttgttcctgggtaaattttttatcgcctagtgggttgttagctaggaaaagggttggtttagagctgtgttaccttgagaaggtaccaaatatccactcctcgtactagtctgtttgtgagggttacggcgagagaggtgggggaacttttcacttgtatgttgtgcttggtcgcctcacagtcgaataggctctgaacctggtgaagctattttgagtagagagaccgatagtaaaagagacagtcccgcaccctcatggagaaatgcttcaa

SEQ ID NO: 5085 - DNA, 219 bp, Cyanidium caldarium
  Clone ID: LIB190-054-Q1-E2-F8
aggtaccggtcaggaattcccgggccgacgcacgcgtcagattcaacgaacgaggaagttccagtgcgtgaggctgtgattggggcgtttatgcgtaagttctgctctggctgccgaattggcagctggaggtgcggaaaaactggtggagacaggatgtgacgaactctgcggggcccaatattgttattgggaagggggacgtatcacatccacacc

SEQ ID NO: 5086 - DNA, 429 bp, Cyanidium caldarium
  Clone ID: LIB190-054-Q1-E2-G12
aattatcggctcgacgcacgcgtcagattttaggtctcctacatcgaacattctctcaagtgcaacatattgcaggaatgtgaaaaattgactgtcccagagttgataatatcaacgtatcaaccatctgtcgaacttgtgatggtcatggcacttatctatagagtctcgatactaaccttcgttcaatagatatcgcagattctaaatggtattatgcaagtgcagatgaagatacctccatgtcaatctgtacagaaaatcgccaagcagatagttaactagcttcgaaacttgacttcaacatacgttgttgagttacgttactctcctcgattttccgagattccataatggatgatcgagcgattggatgtgcatagagacgctgtactccagactcatagactcgtaccactacgtattcac

SEQ ID NO: 5087 - DNA, 448 bp, Cyanidium caldarium
  Clone ID: LIB190-054-Q1-E2-H6
aggtaccggtcagggattcccgggccgacccacgcgtcaagcttcgggctataaacttaagatgttggtgattatctttgaaatgggtgtagctttccactccgtaattattggtctgaatcttggaataggcacaggatcgacattccgtacgttgtttgctgctctcgtatttcatcaattctttgaaggatttgctggcggtactactgtttctgaagcccagtttggcacttggatcactatagtaatggtacgttgctagtcgttggagggtcgaatcggtatatctattggtattggtattgcacacacttatcaggaaaactcctcggcatctttgttaacgagaggcattttggatgccatctccggtggaattttaatatacacaggattggtggagttgttgacttattggtttacgcgcaactcgaactttttaaga

SEQ ID NO: 5088 - DNA, 437 bp, Cyanidium caldarium
  Clone ID: LIB190-054-Q1-E2-H7
aggtaccggtcaggaattcccgggccgacccacgcgtcagcccacgcgtccgcccacgcgtccgcccacgcgtccggacaaagcctaatccgaaacaaggcatttctcagatgaagtggagttttgatggaaagtatttggcttcttgtaatgaaaacactccgcatgtcctctggatttggaatgttcttgaaatggaggttgaagcagttttgatatgtcagacaactattaagacaatacagtggaatccatattgcttacaacgtgcgtgtgtgacaggttccgaatatctatttttatggaattctcaaggtgctgtcagtgttccattaccctttcctgagttttatccgcagtattgtacttggcctttgcaagagaaaggaccacttttgcttgctgacaagagccaattctgcctcgccatggaagaa

SEQ ID NO: 5089 - DNA, 440 bp, Cyanidium caldarium
  Clone ID: LIB190-054-Q1-E2-H9
aattctcgggtcgacgcacgcgtcagcccacacgtccgcccacgcgtccgcccacgcgtccgatgcagcccatgtacagtagcagagaaaggtatccatattatgacggtgaagtatatgatgacacgggtgttgttcccccggaaacgaggcccaaaggaagacgtgtcatagtagaagagccagaagagtacggaatgccgccaggggacagagatgatagcgaagatgacgagcacattggtggttggagaagaagagagcagcacagcatgcagccttggaaccagtcaccttttgaacattttgacagacttttcgaaaatcccttttctgcaatggagagaggaggattcggtggattatttggtaacttggaacagtccttaagaagactggaggaagactttgccaaaggtgggggaaatggaagtgctcat

SEQ ID NO: 5090 - DNA, 361 bp, Cyanidium caldarium
  Clone ID: LIB190-055-Q1-E1-A1
gtgaccggtcaagaattaccgggtcgagccacgcgtccggtataattgtctttttccgtccgcgtcaacaacaacaggaaattcattgatggacaaacctcaagtggatcatcccacgttggtaaagatagacttgtctcaagggagctttaaagtactccaagactgtgacagagatttagaatgtgatcataataccaagtttcagttggaacgtaatcagtatggtcccttttcacctgggttttggaccaaagaaaatgttctgctcctccaattggagctcgtgtcaggtgtattcataagggacaatctctaacttttctacaacaaacgtgaagaacatttgtttgcgaattta

SEQ ID NO: 5091 - DNA, 237 bp, Cyanidium caldarium
  Clone ID: LIB190-055-Q1-E1-A5
attccgggccgacccacgcgtcagcccacgcgtccgccacaagaagaacaagaagaagaagagagcaattgcagcaacagcgcttcttgaagaattttcttggtgcgttggacgtttgtccaaatggcctttttgagtgaagttttgttacgaacaagaatagcaccgagttggcagagaaaaagacattgtttctcctgtcgttcacatcataaagccaaatggtatacgtttcat

SEQ ID NO: 5092 - DNA, 321 bp, Cyanidium caldarium
  Clone ID: LIB190-055-Q1-E1-A6
attcccgggccgacccacgcgtcagctggccttgcaactgggagtttacgggtctgcctattactgcagataactggattcccaaggataaggatgggaacataaagttttccaagggttcactatagcagacttggcacgctatggaagaagttcagaaaatgggtcccgtaaagtccaatggcgtttccaactaatccattgtgaataagttggaccttttcaattattgcaagaatccaacagcagtgaatcaaattgaaatgcatccgtaatatgcaagaacagatttgccccaattttgttagagtcctggaattc

SEQ ID NO: 5093 - DNA, 440 bp, Cyanidium caldarium
  unsure at all n locations
  Clone ID: LIB190-055-Q1-E1-A7
gacccaagcgtcaagcccacgcngtccgcccaagcgtccgcccacgcgtccgccaaatcttcgacactacgagcaattcagtgagaatggcgacgagtagtttgttgccaaacaactccaacgccaccactacaaagccagttgttcgtgagtgggcggacgaagacgactcgtcaaacaacaacaagttaccacctcgtgaggaatggtacgatgaggaaggtttgaagcacgttgttgaataccatttcaacgatgacaacaaactgggaataccacaaaagtatttcgagtaaagaaacagactagacaagttagcaagacggttgcagaaagaaggcactggaaaaagtttggccaacggtaaaaaaccacttcctgaaccggaacccggtgtcactgcagtgagtcttgacgacatttccatcgaatacaaacat

SEQ ID NO: 5094 - DNA, 308 bp, Cyanidium caldarium
  Clone ID: LIB190-055-Q1-E1-B10
acgcgtcagcacacgcgtccgagccacttttgcaacttgacaattttgtagttcgaagataatggcagttaggcaatgtttgcttgttttcatatgtctttcggctctgttaggttcaactttggctgcttctggtgcaacgtctatttactcgttgcttcagagtaaaacagactatacttttacagtgcaaagcatagagctggctaatctaacagacgtatacaacagcagtgtattgggctttacctttcttgcttccaatgacactgcttggaaacaatcaagagccaatgtcactggtgcac

SEQ ID NO: 5095 - DNA, 435 bp, Cyanidium caldarium
  Clone ID: LIB190-055-Q1-E1-B11
cccggctggacccacgcgtcagcacacgcgtccgtgttgttgttcttttgctttccttggaggatgcaagtcaccttgaacttgtttgtaactggttaccatcctgaagtggttatatgtagcataaacaatctattcgtagactggaatgatgatgatgatgatgatgacatttcaccaagcaccctaccaaatagtctttaccgaaatgaatatttcttacagattttcttttggcagaccggagaatgttatcaactttctctatccaaagtcagctttgtgtttcaaaagttttgggtttctgaaccaagcattctactccgcatagaaagccccaaaaacgatataagacaacacttgctacgagtgtcttcttccattagtgaaatggaaacagaatcactcgtatatctccaatccattcaagatgag

SEQ ID NO: 5096 - DNA, 255 bp, Cyanidium caldarium
  Clone ID: LIB190-055-Q1-E1-B2
gccacgcgtcagcttaaggaagaactacgaaagcagtctgcaacacatatcaaagtcatcgttggtggagtcattccatatacagactatgactttctgagaaatattggagtcaaagtaatttgtggacctggaactcgcattccagatgcagctatgcaagtattgaaagccattgaagaagaaccaaccaacggtgcaagtaatggtgtggaacaaacatcgtagtataaattataagaaaattatttcgtt

SEQ ID NO: 5097 - DNA, 452 bp, Cyanidium caldarium
  unsure at all n locations
  Clone ID: LIB190-055-Q1-E1-B4
gggccgagccacgcgtccaaaaggtagcgaagtaaatagacgtttgaaaggcgtccagtatgaaaggagaaacgagtgtaacactgtccaatcctccaactcaacgaaacaacaataactgttaaaattccattaactaacaattaggacggaagaacccaataatccttaacaaaataaggttaaggaaggaaaaaaaatcataaagtaaaggaagtggggtaagagaataaagacactgcatgangataaggaatctaactgagtaaggaaaataagcttaagctagtttggctggggaagtaaagcctaagaanagagtaaattaggcaagcanaggcatgagagaagtataatagcagaagcatgcttgaagaaaaagaaagagatttccagaaaggaagaaaagtcagctatagagaacaagtgaaggagaactcaaaaagaggaga

SEQ ID NO: 5098 - DNA, 440 bp, Cyanidium caldarium
  Clone ID: LIB190-055-Q1-E1-B5
gacccaagcgtcagcccacgcgtccgcaagtattcatggaccactgtggaaacctactcctcaagacaatagcaatactagtcttggttgtggtgtggagacaaagaaatcgaagaagaataagaaacaacaacattctagtagcaattgcaacaatactgctagtcatccacaacaactttcaacgcatcttacaactagtaatcatgatttggagtcgaatcggttttcggtggaaagagaattgccgtcattctctggtcagccaacttgtactactccaatgtatatgacacaggaaaccaacagaacaagaaaggaaccagaaaatgtacaaaactttgttcattggacaaaagaaataactcctaacaattgttcctcctcccaatttacaatttccaacattacaaccacaagaagaagaagaagaatggaga

SEQ ID NO: 5099 - DNA, 240 bp, Cyanidium caldarium
  Clone ID: LIB190-055-Q1-E1-B6
agggaagagcaggatataaggaagttgggaggaggtaggatgaatgtgagtaagatgggagtaataatagggagtatgggaataatgggaatagaatacagtagcgtatatgaatcgaaggaggagataataagggagagtagtatgagtagatatggagaaataagtagtgtaatgggagtgggaataacaagttattacagtataaggatgataaagagggtaatagtaagtgaagga

SEQ ID NO: 5100 - DNA, 298 bp, Cyanidium caldarium
  Clone ID: LIB190-055-Q1-E1-B8
aattcccgggccgacccacgcgtcagcccacgcgtccggttactgctcacagcgactctttctccgcaccaggttctggaactgttactatatctggctttggtggatccggtccatttggtttggcaatgtatggcaattatccttcttcaggagcatcacaacgatttcttttgcatcaagcaagaaagacagccgcaaatattttctaatacaaaggatgacagtgtccataacctcaaaaaataaatgagtacatgacagcgacaaagaacgctgtatgcaggcgatagataaa

SEQ ID NO: 5101 - DNA, 414 bp, Cyanidium caldarium
  unsure at all n locations
  Clone ID: LIB190-055-Q1-E1-B9
ccgggtcgacccacacgtcagaaagaaggaaaaggagaagaagagagggtaggcttagaagcagcaaaccagagaggaaagcgttaaagcatgaaagaaaagaaatccgaaaaagaagagaaaaaggtaagaaagaggaccgaatcaaggtaagaggtagaggagcaagaagagaagagagaatgctgggtggagtagcgaaacaagagaagggaagtaaaaggtaagaaagaggaaaggtttacgagagaaggaagtagaaagaagagagtgtaaggcggcgtcataatagaaatccgaaaggagtagaagaaaagagagagaagaaagaaaagaagagaaaagccgtactgaangacgacacaggtactcgaggagaaaggagacccaaattaaggtgagagaatggacgat

SEQ ID NO: 5102 - DNA, 375 bp, Cyanidium caldarium
  Clone ID: LIB190-055-Q1-E1-C1
ttgcacatcaaagtttttgaacccatacttattcttggtcaagacaagtttgcggacttggatattcggttaaaggtcaaaggtggtggacacaccaaccaaatctatgccatccgccaagctattgcaaaaggactagtatcgtattatcagaaatacgtcgatgaagcgttgaaaagggaactcaaagatacgttgatttcttacgatagaaccttgttggtagcagatcccagaagatgtgaacctaaaaagtttggaggaagaggagccagagcacgctttcaaaagtcctatcgttaagtttgtgattgggtacacccaggaacaatgggaggagtccttttataaagaaaattcggtgccaatctaaaa

SEQ ID NO: 5103 - DNA, 372 bp, Cyanidium caldarium
  Clone ID: LIB190-055-Q1-E1-C12
cccggctggacccacgcgtcagcacgggaattttttggcttttgtgaattggcaaaactcacaatattgtcaatggcagaccttgagaatacaggaaaaactaaggctactatcgcaaaaagtctcattgagaaatactacaagtctttttgtaatgatttggtcgagagaaacaagagaaagaacgagattgaaagcaagctagcagcaatgaagttgagtgagggtgaaaggaagaaatacagacaggagttgttgaatagagaattgcggtttctgagagaaacgcacaagagaatgactgaagaccaatttgaaaccgttgacctcaatggaaagggtgcctttggtgaaattcctccgggtctaaaa

SEQ ID NO: 5104 - DNA, 298 bp, Cyanidium caldarium
  Clone ID: LIB190-055-Q1-E1-C6
gtaaggtcaggaattcccgggccgacccacgcgtcagaagaactggaacacagaagaaacgtcaccaaagcgacaatagaaagtctcaagaagactcctaccgaaaagtcaaggcttacattttctggacaacttgaagaagtttatcgaaggaatttaaagatattcaacgagccgggtgacagtgttggggcacttcagtttatgaaaaattaatatcaaaacagtaatagtgtgattgtgtgggagctttattgtctgcttgttgtctaacctaaatagttgttgttgttgtttt

SEQ ID NO: 5105 - DNA, 239 bp, Cyanidium caldarium
  Clone ID: LIB190-055-Q1-E1-D12
accggtcaggtattcccggctggccccacgcgtcaggattgccactccaagtatttgccatagaagaagagaagaccaagggctggttgtttttatctagtgctatttggatacaaaccctggaaagaattggaatatggagatattgtgggaactggtatagctagagtattgttgtgatagcgtgttgtatcccgactcgaacaactttacatggcaataaaagcagttgttcaagg

SEQ ID NO: 5106 - DNA, 256 bp, Cyanidium caldarium
  Clone ID: LIB190-055-Q1-E1-D2
gggccgagccacgcgtcagaaacatatcagttcgagccattggcgaaagttagtgaagtgcgacatgatctgaagccagctaggaaagaaactgaaaaatatttaaaaggtaaaagtttggataaacccttgaatttcatcacgaactcgtcgataaacttccaatgcttcttcttctgttgagcagttctttgcaagaagaggaggatcttcaaagcctatcgaataataaaagaaaagtaataaaattgtagcc

SEQ ID NO: 5107 - DNA, 438 bp, Cyanidium caldarium
  unsure at all n locations
  Clone ID: LIB190-055-Q1-E1-D3
acgcgtcaggtctatgtcgcctgcatttgattcaagaaagtgttcctgaagactatgcccaacaaacagaacaaggctggaggcagcatatcttcatgcccatcaaagttgtttttggctatgctccggaaattcctttttgaagactttttggctcattcaatttcggataatacattttgataagcgaccagttggttggaaggctgagatggttgtttccatgttaaataaagcgcaacaacaaggttgagaaaacaaatggctgcaattcctaggatgtctactgtaaacgaaccagtttttgtcttacatattccgcccatcacggaacccaaggccgaaccgacattntgcaaagccgattaagaatttttgagaaaaccctaacagttccgttccaatgcagaaatgaacaagtgcatacaagttattcca

SEQ ID NO: 5108 - DNA, 439 bp, Cyanidium caldarium
  Clone ID: LIB190-055-Q1-E1-D4
acgcgtcagcccaagcgtccgcggacgcgtggggccatgtttctgaccagaagcgaatatgatagaggagtaaatactttctcgccagaaggaagactatttcaagttgaatatgcaatggaagcgatcaagcttggttcaacagcggtaggtatacaaacagctgaaggtgtagtactcgcggtggaaaaacgtctttcttctacgctgttggagcctaatagtgtggaaaaacttgttgaaatcgatgaacacgtgggttgcgcaatgagtggcttaattgccgatgctagaactatgatagaacatgcacgagtagaagctcaaaatcatcgatttacttttgacgagccaatgccagtagaaagcttgacgcaagcaacttgtgacttggcacttcgtttcggggaaggtgtggaagacgatgacgaaagggaag

SEQ ID NO: 5109 - DNA, 444 bp, Cyanidium caldarium
  unsure at all n locations
  Clone ID: LIB190-055-Q1-E1-D5
attcccgggccgacccacgcgtcaagtcaacttgtagtttgctctgttgataacctgaaagacttcttgggtcagcaagtttatgaacaactccagaaagtatactcggataatgaaagcgttttgatgaagttggatcctctcgcgaagttgttgggaagaaatcttgaacgattatggaggagcgatgttcctgtggtgcccgaaccttcccagatggatattgtttccaccagaactgatacagacgagatgcaagtaacagagcgtaaaggagttgtctcagtgcgacaaggccagtttgattggatggagttcttgaaaacatattgtaaattgacagagtctgaagcaagagaatctagttatcgactaagtccaattggaagaccaggatttggaaggattanactcgtacttattagaagtactcggaatcaaaga

SEQ ID NO: 5110 - DNA, 377 bp, Cyanidium caldarium
  Clone ID: LIB190-055-Q1-E1-D7
gaattccgggccgacccacgcgtcagattctctctcttcacttgagggaaattgttttgtatttggcaatgtttcgacggttactgaagtacttgactgcaaatattctcgcaagacattgttcaaagagtgcggaagtgacgttaaaagttgaaaggcctcagtttaacttttctttgagcatcaatgggagaaataacttgtatgctgactctgtttgtgtgggaacttggcaaatgaatacttcgctgctgcagaaaacaagaacaaaaatttggtttgaattgtacagtatgccgtcaaagaacgttcgtaacaacttgcgtcatttctcggagcaagttggttcagggatgccgtcaagatttgccactgga

SEQ ID NO: 5111 - DNA, 346 bp, Cyanidium caldarium
  Clone ID: LIB190-055-Q1-E1-D9
cccacgcgtcagccgcagtagaaaatacatgggaatatccaaaggcatccaaggtaaccaaggaacttcctggaaaaaacttggtttttccccggtcaaggggaaaattacgtttggccaacggaccaaagaccctccagaacgggtggatgcatcctttggcaaagcagaataccatcaacctccaactaatgaacaagccgatgcctgaatgaaactttttgaattttggtaattaaaatttggttgtttgctttgaatgtgccaagaattgtcccgtttcctggtggaattcaactcgtacacacacacatacatatatatatgaatgaaaaatgctgcaagg

SEQ ID NO: 5112 - DNA, 421 bp, Cyanidium caldarium
  Clone ID: LIB190-055-Q1-E1-E10
cccggctggacccacgcgtcagcagacgcgtgggcggacgcttgggaagaggaggaggaggattggtggagatctgaggagacaagagatggattttacgactgctcgagtcagtgttggttttgtatctctttctttagagcctacgacatggacaagtggatcatccaagctatttcgtaaaaatgctagtcgttcacagtttattccccaaagaacgttgtgtccttgttcgcactctcgtcactctagatatagtaaacacttcaagactgttttggaagccaaacttcgtgtagctgtagttggaggtggtcctggtggttcttctgctgccgagacactggcaaaggctggaatagaaacgtacatttttgaaaggaagtgggacaatgcaaagccttgtggaggtgccattcct

SEQ ID NO: 5113 - DNA, 438 bp, Cyanidium caldarium
  unsure at all n locations
  Clone ID: LIB190-055-Q1-E1-E12
accggtcaggaattcccggctggccccacgcgtcagcatgaagttttggaaagatttttgggctggtggctttcctggaggagaagcttatttgaaggaggtgatagagagtaactttcaaaagccagttccaggactcgatactagtggagtaacgggacaaggggaagaaaagaaagcagttggcaaccgaacacagcagcctgccaaagcttcttcgggaaaagactccaaccctccttcttccaataatggcactggcaacttggcaaggtgtgggcaaggtcctccaataacaaaaccggtcaaaaggagaagtcgtttggaagtcgtaccagaggaatagacaataacttacttagttggtattgtgtacctgttggcttctcctcgtattggtttgggaattccaatanaacaccaacattttttctttcc

SEQ ID NO: 5114 - DNA, 436 bp, Cyanidium caldarium
  unsure at all n locations
  Clone ID: LIB190-055-Q1-E1-E2
acgcgtcagcccaagcgtccgcaacgactttgtgaaaagattggattttctgttgctgttcattatttttcgcacgtctgcaagttcgaggcaaagttgtacactcttatggaacaacgttctttgcccttgaagttgggtttcctaagtggaagtgttatggcagaagccatcattccgggtattatagaaaagaaactggtggatccttcttctgttactgtctatgacgtagttgagtctcgtctggatcnttttcagaaaatgggagtanggacctgtaaaaacagttttgagatattgcatgctgacgtcatcgttttagcagtaaagcctgatgtagtctctgaagctctcaagtcccataaagacggatggannacagaaaaacaccttctagtttccatttgcgcaggagtgtcgattgggacaatag

SEQ ID NO: 5115 - DNA, 443 bp, Cyanidium caldarium
  unsure at all n locations
  Clone ID: LIB190-055-Q1-E1-E3
cacgcgtcagcggaagcgtgggaaagtgtagaaagagtctgtaaagaggcttttttttcgtggttcgatgggtggattgtacaatattttttgacaatgaaaaaaaatattgtacatctactgaaatgcaagaacatgaggaagaaagaggcaaatacgggaaagcagtaaaagaagaaagagaaaggaaaaaactgagtatcaggaagaaaagagggagtagatgaggaaagaaagataaggaagtaagagtaagagaaggagtaatgtgaatgaaagcacgaaagtatttgaagaagagagtgtaaagcgcgtaccttttgcataatgtcncagcgagtgaaagagggaagcaaaaagaaggaaaaggaagtacccaggtaagacccgaagctagttgatcttatgctgtccaagcgaagtaaggctgaaccagtatctgt

SEQ ID NO: 5116 - DNA, 436 bp, Cyanidium caldarium
  Clone ID: LIB190-055-Q1-E1-E4
cacgcgtcaggaagattgatagatatcttcattcattacagacgggacgagttgctgcccacaaagctttagaacaatatgtggaacgtcgttgtagcttatccaaactagtaagctcgttggaatgttgctttctggagcgaagtcatcaagaagggtccaaaatgggcaccatcttctcccaagtagcacaatcctttgcaaaggatatgttctatcccaaagatactacttaggtcgcaaggtgaagaatggctagatgctgtgttgcaagattattcattccttgctcgtgacgcccgacgggttttaggtgaacgtgtacaagcatacgaatcttatgaaaagggcctatcagaacacaatgaaaggatgccaacaacgggagaatggtcatagttccacctccacgtcctcgcatcagactgaaaacccc

SEQ ID NO: 5117 - DNA, 437 bp, Cyanidium caldarium
  Clone ID: LIB190-055-Q1-E1-E5
gacccacgcgtcagcccacgcgtccgtcccttttcaccaatcctcgtgagcattgttttgtgctcgttcgttttcaatggccttttgtatttttgttttacaaagctcaaaacttgtgtcgtcgagagctcaaaccagtgttcgaacatatcagttatctagtaagaacacagttcgggtgtttaccgggaaggtacttgtggggaggacttgtcgaaggctttcaaaatggttgttagccagtgctgacagtgaaagcactgtaaaccaatgcgtttctgaagaagaaaaaatagtgaaagaagtgactgaagtaatttctggagttgatatcaacgttagattgacttcgctaggcggtcgaagacgcagaatctcgggtggtcttgatatcgaagctccagtgaaacgcgtctgggaagttatgaccgactatg

SEQ ID NO: 5118 - DNA, 371 bp, Cyanidium caldarium
  unsure at all n locations
  Clone ID: LIB190-055-Q1-E1-E7
ggtaacggtcaggaattcccgggccgacccacgcgtcaaaaatttcattcatcgttgctcattcttgttgcagatatgacaggtcctggtaaaagtggtaaaggtttaagaaaaggaagttcaaagcgtcatcgcaaagtcttgcgagacaatatccaaggaataaccaaaccagctatccgtcgtttggcgagaagaggtggagtgaaacgaatctcaggacttatctatgaagaaacacgaaatgtccttcgtgttttcttggaaagtgttattcgtgatgcagttacttatacggagcatgctcgtcgcaagacggtaactgctatggatgtcgtatatgctctganacgtcaaggccggcaccttta

SEQ ID NO: 5119 - DNA, 436 bp, Cyanidium caldarium
  Clone ID: LIB190-055-Q1-E1-E9
cccggctggacccacgcgtcaggagaaaagaaaaagaaatgagtggagtagtacaaggagcgaagatgatgggagcaggaatggcaacgataggtttagcaagagtacgagcaggagtgggaatagtatttggaagtttggtgaatgcatatgcaaggaacccagtattgaagcagcagttatttggatacacgatattagggtttgcgttaacagaggcagtaggactgtttgcattgatgatgagtttttttgaaacggtttcatagtataggagaaacaagaagtagaagagaaatacaagagacagaagaggagttatgagagaaaagatggaagtaatagaagtggtaagtggagtaataatgaatcatatgaaagaaggaatggagaatataacgaacgattacatgaacgacgagataataggagaaat

SEQ ID NO: 5120 - DNA, 438 bp, Cyanidium caldarium
  Clone ID: LIB190-055-Q1-E1-F1
cacgcgtcagcccaagcgtccgcggacgcgtgggcgacgattttttcatcgccgtaagagcgcgccacaatgccgactcgaaagctgtacgtccgtaatgtttccaagcatgctactaagagagacttggaagacctgttttccaaatatggaagagtaagggatgttcggttgttaactgactaagcttttgttgagatgggcgacgaaagagacgccgaagacgctcgctattaactggaagggaagagaatggaaaggtaacgtttaaaaagttgagtttgcaaaaaacgagagagctcccccaaggcaaccaaagtgctaacaactgccggtttactgggtcactttgctagggagtgtcccaatggttactggagtaaccgttgttaccgctgcggggaaaaggggcatacacaaaaggattgtacggctcct

SEQ ID NO: 5121 - DNA, 422 bp, Cyanidium caldarium
  Clone ID: LIB190-055-Q1-E1-F10
ccacgcgtcagcagacgcgtgggcggaaatattttcaatgagaaacgagccgcttggaaggctttgttctcagaagttttcactgagagacaagcaccttttctatcgtattttccttaggtactctactacctcccatcataaactgcagcacgaacgagttgtgttattgcacggctttctaggttttccgatatcaggtattattcaagtatccagcaatatgtgtttacagtttgtgaaattgtaactcattctttttatttatacagttatcacctttagctactttactaaaaagaaagggtttttcagtttcgaactttggatacccttcaagagacgactttatctcgggtcatgcccataacttggtcgatgccttgaatagtttagcgttaagagacacctgcaagtttcac

SEQ ID NO: 5122 - DNA, 353 bp, Cyanidium caldarium
  unsure at all n locations
  Clone ID: LIB190-055-Q1-E1-F2
acgcgtcaggaacaacaattggtgcctcatacttgttacaagtattattctgtacccaagtttattgaaaagtgctatcctcagtatgcaacaacggagaaatgtgtagagtatgagtatgttccatatgccacttctacaccttatccatcggtatctccaagttatactccttcagcatatcaaacaacttctgcttattaaagagccgaagactggatagatttttgaagtgtctcgtgttcaaagaaaacatgagacataagaaaaagtaaaggatttggttttatgtataaaaaaaaaaaanaaaaaaaaaaaaaaaaaaaaaaaacaacacaaaaccaccacacccc

SEQ ID NO: 5123 - DNA, 424 bp, Cyanidium caldarium
  Clone ID: LIB190-055-Q1-E1-F3
gcgtcagcttaacggctttggcacgtaacttttccaatgtctgtctctcgaggagtggtctgagagggggatgtttacgaaatgtgaaagttttcaaccacaaacgacctgcaaggttgttatctacgaaaatgagaagaggcgaccatgaaaggagagaacttagtcgtcctatgcgtacgcttgattccgctttcgatgaacttttagcttttgcgcaggatccctggtccatgtttcgctctccatggagtctgtctcccaaaaagtatggcagtagacacgtggatgcctcgtgttgacttggtggagaaggaagatggcttttatgcatacgtggaactgccacggcctagcccaaaagaccttaaaggtcgaatttagaggagacgttgttactatttctggagaaaagaaggatgaa

SEQ ID NO: 5124 - DNA, 443 bp, Cyanidium caldarium
  unsure at all n locations
  Clone ID: LIB190-055-Q1-E1-F4
gggtcgagccacgcgtcaggcgcaagttatgttgggtgtcgatattctccgtctgcagttggaaaaactgcaacactttttagcactagtggatacgaaaccctcaatgtctatagtatttttggcgtttaatggatggatacttttgttttttaatagttttggtctttcctggatactccttgcgcctttcagaaaactagacctcatccaacgttctgattggtcgtcacgagtcgtttccaacttcaacgcttttgttggctgtttactgtttgcaaagtttgtgtttggagaagaactgctctatcggacgggagtcttttcctacagcgcagcttgttgtggcctctggaaattaattcttggatactttttttatgatagtttgttgattattttggtatttgaagttcacganaccataaatattcaaaccatta

SEQ ID NO: 5125 - DNA, 450 bp, Cyanidium caldarium
  Clone ID: LIB190-055-Q1-E1-F6
aattcccgggccgacccacgcgtcagcccacgcgtccggatgagcggggaagccttggcggagaagcttaaaaaccttcctttggaagaccaatttcaagcagagtatgtctggttagacggtaattttcacccaagatccaagggaagaactttaaatctgagggacttcggtgccgcccctcacaaagcccctgcttctgcatttcctgagtggaactatgacggctccagtactggtcaggctgaaggccacttttcagaagtcatcataaagccctgtgctgtttatcgtgatccttttcgtggcggcaataacgtactcgtcctttgtgacacatactggcccgatggtactcctcatcctaccaatactcgacatcattgtccagaagtgatggaagcagcaaaggatctggagccttggtttggagtggaacaagaatacttt

SEQ ID NO: 5126 - DNA, 352 bp, Cyanidium caldarium
  Clone ID: LIB190-055-Q1-E1-G10
cctggaatacatccaacattttattcaagataaaaaacccaacttgctgccattcgtcttggctaaacgaatcaaagcttgtcgtagcttgggatccatccccacatacttacagaactccgtgatcacttgtgaatgcagagcaatcgcttttcctcgtatcctgttaaacctatccttgcccaagacccatcgcgtcacgtatacaataggagtgaaaggaccaaagtcggaaacctttcccatgtaaacactcaatcctagtcttctaactctgctgtcactaaatgaagcaaatcgattgcttctcagtctataggagcaacaatttgaaacaaaaagagaggaacca

SEQ ID NO: 5127 - DNA, 207 bp, Cyanidium caldarium
  Clone ID: LIB190-055-Q1-E1-G12
agtaaataagatgcatggaacaaaaacaaacgaaaaaaatcatagcatcaacacatacggatacttaaaccgtcaaaactaactcattaagtcacagacgttttcatactacgtcgggatccttgccgcatctttctagtttgcgtttgtccaatctcgcaattacattcgttccattgatatcaggtccagttggttaatcccgct

SEQ ID NO: 5128 - DNA, 436 bp, Cyanidium caldarium
  unsure at all n locations
  Clone ID: LIB190-055-Q1-E1-G2
acgcgtcagcggaagcgtgggcggacgcgtggggccaaaggtctcagaagttcaaggtcttaagatagttgcaggtctcgatattgacaagataataagtttggttgctcaagtggagagtcactcagaccatccttatgcaaatgctattgttcgttacgcggaagaaactcgaggtttgcatgtttcaaagcaagtccaatcttttgaagaaataccgggttgtggtgtgcaatcgatcgtctccaatcatgaaatattcataggaaacttgaaatggatcatctccaaatgcggtacctcacaagaacccacanaggattggttggataaggaatatttagaacagctacagagttggatgaagaacggaagtactgtcgtggtagctgccatagacgatactccttgcattgcatttcgcgtcgatgatgag

SEQ ID NO: 5129 - DNA, 365 bp, Cyanidium caldarium
  Clone ID: LIB190-055-Q1-E1-G6
gacccaagcgtcaggggaaagttagacttccccaaagttttatcgcaagtacaagacatcgttcgacaacgtttcttcggagacagtacaaacggggtctatagtcctggtgtacaaaaaaccctgtttgacattggtgcgcagattcttatgtcttgtccgctcttggagaacgtatccctaagtatgccaaacattcactatttacctgccaatttagaagtgttttcgaagaatggggttcgatttgagaacgatgtttacattccaacggatgagcctcatggcactattaaggcaacgttgtcaaggtcttgccttgcaaaattgtaaaggtgattcttgcttttgaaaaaaaacaaaaa

SEQ ID NO: 5130 - DNA, 455 bp, Cyanidium caldarium
  Clone ID: LIB190-055-Q1-E1-G7
aattcccgggccgacccacgcgtcagcccacgcgtccgcaaccaactaccaccaaaagtagcaactgcaaggaagaacagagtgtcctaaagaatagcaagttgtgatgaggagaattggtagcaaactcttgtcttattccggcaatgaagtaaaacttcgggatgttgtttcttctctaagggagacgagtaaagcgacggggtcttccatccggagttggcttcgtgatatcaaccagtggtatgaagacacttactataaaaagggaaaggtggatcctttggtacattatatgttactttgttttggagtgggatataccatcaattactcccatatcaaacataaagtggagcataagaatgacgatatcgaaagccttgtaaaggtcaccttgtggtgttgtggtgatggctgacgcatagttggtgatataggaaggtttccttctt

SEQ ID NO: 5131 - DNA, 429 bp, Cyanidium caldarium
  Clone ID: LIB190-055-Q1-E1-H11
ccacgcgtcaggacggaaacgcagtggacgttggagtcgcctcaagatgtagaaaacttgctcagcaacacaaaactgtatccaccacaaccaagttgcaagctttctttccattacaagccttcggacgaacagtgggataaaattttggaaaaggttttcaggtacttgtccaacgatggaacgctccaactggagttgtgtcaaggagtagacaacgcggtgctcctaaagacggaactcaaactttgtgggtttaaggacattgtggtggaagatagttccgtggagaagaaaacagtgtggaccgcaaggaaacccaactgtgactttggtgtttccatgaatattggaaactccaccacagcttctacgcacagcggtggaaacactaggaccaacaatgaaaccgtgcaattatggacacag

SEQ ID NO: 5132 - DNA, 452 bp, Cyanidium caldarium
  Clone ID: LIB190-055-Q1-E1-H6
attccgggccgacccacgcgtcaggagaatacgtcgtttgaacgaacaaggagaagaagaagacaaagaagacgaacaagaagaaatgcaaagtgaagagttgacaaggagttgttcggaatttcttctttcgtattcttccgaaatggtagactgtataacctcattgagcgatgacgacgaagagaaagagtcgttcgtggcttctcgacttggacaaaaactgggaaagatgctggatagttatgcctcgcattgtagtggaaaaaataagactttgttgtttcgtcatgttccggacgacacaccaacgaagcattggcttatcgacaagttcaagttaccaacgagaaccttacgggttaccttgtcaactggagtttgtccaaaaaacgaagaataagagttttgcataccaaaacacgctgtccaagtggcttcccgtcttgaaa

SEQ ID NO: 5133 - DNA, 454 bp, Cyanidium caldarium
  Clone ID: LIB190-055-Q1-E1-H7
gaagtcccgggccgacccacacgtcaggtacaacacttgcatttcttgcacaaaaagtgccagaattcgagaaaacgttaagtgacgaggatgaaagattaggagcacaaattgttggtcgagccttggaagcaccgctcgttcaaattgcgacaaacgctggaaaagaaggctatgtggttcttaatgaggtacgtaaaaaggaactcggctggggatggaatgcggcaaccgatgagtacgtcaacttttatgatgccggaatcgtagatcctgccaaggttgtttgttgggcgttggagaatgcagcgtccattgcttctatggtactaactacggaagctttggtcgttgaaattcctgagaagacaaagaatacgtccttcgggtgaaaatggaatgggagattttacaggagaaagctacatgtaaaagtagcgccatattctaaaat

SEQ ID NO: 5134 - DNA, 306 bp, Cyanidium caldarium
  unsure at all n locations
  Clone ID: LIB190-055-Q1-E1-H8
taccggtctagaattcncgggccgacccacgcgtcagggtacaggaagagatggaacgattcggtcgctttttatcaccgaaaacagaatatagagacgatgtgagtttggataaagtggatgtgaatatgtggaaagcacaacaacgagagcgttggttttttgggagagagttttcggcacaagaggataggctggaagacgaccaaaaagggaatgaggangaagacgacaaggacgatggcggtgatgtggactataaaaacttgcaacgacttgtgaaataaaatttttttggttgtgcac

SEQ ID NO: 5135 - DNA, 221 bp, Cyanidium caldarium
  Clone ID: LIB190-056-Q1-E1-A10
cacgcgtcagatctatttttccaaaaaaaaaaaaaaaaaaaaaaaaaaaaaaaaaaaaaaaaaaaaaaaaaaaaaaaaaaaaaaaaaaaaaaaaaaaaaaaaaaaaaaaaaaaaaaaaaaaaaagaaaaaaaaaaaaggggggccgcccaaaaggatggcaaccccacctacccgtccaaggaacgtcaaagccctccaaaagggccacctaactccaatt

SEQ ID NO: 5136 - DNA, 71 bp, Cyanidium caldarium
  Clone ID: LIB190-056-Q1-E1-A11
aaaagggtccaagcttaagtacgcttgcatgcaacttcatagctcttcaatagtgtcacctaacttcaatt

SEQ ID NO: 5137 - DNA, 433 bp, Cyanidium caldarium
  Clone ID: LIB190-056-Q1-E1-A2
aattccgggatcaccacgggcccgagaaggaaggtagctcagtgtattgttggaggaagtggaaagaaagctattggaggtgatttagaaggtggctattacattgaaccgacgatattcaagggagataacaagatgagaatattccaagaagaaatatttgggccagttctgagtgtcacgactttccgtacagaagaagaagccatccaaattgccaacgatacttcgtatggtttaggtgctggtctgtggactcgagatattatgaaagcttatcgcgtatctcgagcaatcaaggctggtcgtgtttgggttaactgctatcatgagtatccttctcatgcggcgtttggtggttataagaagtcacggtttggtcgtgaatgccacaagttgactttggagcactaccaacaattgaacaacatta

SEQ ID NO: 5138 - DNA, 228 bp, Cyanidium caldarium
  Clone ID: LIB190-056-Q1-E1-A7
taccggtctagaattcccgggccgacccacgcgtccaatagtcccgccatcgtatatactactgtccaatgctacctcaagttagcttccgatcgagtagagcaaggaataagttttggctccaacctggactttaaatatgcggcaaaacttgtccgtggtgcttatatggtgtttgaacgtcgagtggcagctgagaaaggttatgcttcacgcgtttttgaccgt

SEQ ID NO: 5139 - DNA, 448 bp, Cyanidium caldarium
  Clone ID: LIB190-056-Q1-E1-B10
ggtcaggaattaccgggccggcccacgcgtcagattggcttaggaatggttgccgctgcaaaactggctggtccttctcgtctgatcgctttggattgtatggattcaagactagatattgcgagagagtgtggggcagacatagtattgaatcctcttaaaacaaacgtcgtaaaggatattcaagaacttacggatggatatggatgcgatgtttatttggaagctactggaaatcctaagagcgttgaacaaggtctctatatgattcgcaagaatggaagatttgtagagtttagtgtattcaaagacaagactgctgtggattggacgattattggagacacaaaggagttggatatactaggagcacattgcagtggagataatggatataaagtagctattgatatgactctccgtcgccaaattcctgtggagcgtattg

SEQ ID NO: 5140 - DNA, 450 bp, Cyanidium caldarium
  Clone ID: LIB190-056-Q1-E1-B12
gtcaggaattaccggctcgagccacgcgtcagcccaagcgtccgacaaagtgtcgtttacaaaagaaagtatcacatattccctcgtattgtgtgaggatgagttgggttgcaactttaaaatcttccaaaatagaaggctcctctgctattccagaaggtgaacagcctgacctccatacaaagtgggagcagtgtttacaagagaaagggtcaccagagtgccaacagtgtcaaggttcaggacaaataccatgtcctgcatgtgaaggaaagggttatttcgtgatggaagttttcaatgttacctctagtaaccagtgtcaagtttgccgtggacaccgtaaaactccttgcccaacttgtaaagaatacatttatcgggcagtaaaagatttatgatataaagttaaactcaatctttacaaatggaaatattgcctccagtaac

SEQ ID NO: 5141 - DNA, 388 bp, Cyanidium caldarium
  Clone ID: LIB190-056-Q1-E1-B5
acatgcaagtaggtaaagcgaacgggtgagtaaagaggtgtgaaagagtggaagaacatgaaagcacagaagaatgtaagaaatggttagagtaaaaaccataaaggaagtaaaagcgggaatctgagaggaggaaagccacattggaactgagaaaaggtccaaacaagggagtagatgaggaaagaaagatcaaggaagtaagagtaagagaaggagtaatgtgaatgaaagcaggaaagtatttgaagaagagagtgtaaagcgcgtaccttttgcataatgtcccagcgagtgaaagaggaagcaaaaagaaagaaaaagaagtagccaggtaagacccgaagctagttgatcttatgctgtccaagccaagtaaggctgaacc

SEQ ID NO: 5142 - DNA, 421 bp, Cyanidium caldarium
  Clone ID: LIB190-056-Q1-E1-C10
acgcgtcagcccaagcgtccgggctgaaaagacacgctttgtttggcttgactttattcgagttcctcgttgtcgaagagcagcagtctacggcattcttattatgatcgttcaacagttttcaggaatcaattctatcaattattatatgggaagtttgatgaaggaaactggattatccgcccagaatgcagtctatactagtatgattggtggtggcacaggattcctttcaactattcctgcaatatatctgatggaccgactgggacgtcgaccactgttacttactctcattggcggagtcgtggcaggtttatttattgttggcttttcattccttgcttccaatattcacaccaaggaacgtatctatatttgggggcgttgtcatctattatcttttctggggttctgctct

SEQ ID NO: 5143 - DNA, 432 bp, Cyanidium caldarium
  Clone ID: LIB190-056-Q1-E1-C11
acgcgtcagaggaactcgaatggtgagagaactgtttcaaatggcacgttccaagaaagcttgtattatattttttgacgaaatcgatgccatcggaggtgctcgttttgatgatggcgctggaggagataatgaagtgcaacgtacaatgttggaaattgtcaatcaattggatggattcgatgcacgtggaaacatcaaagtgttgatggcaaccaatcgtccagacaccttagaccctgctttgatgagacctggtagattggatcgaaaaatagaatttggtttgccagatttagaaggaagaacgcatatctttcgtattcatgcaaaaagtatgaattgtgaacgcggaattcgctttgaactattggctcgtttatgtcccaacacaacaggtgcagacatacgaagtgtttgtacagaagctgg

SEQ ID NO: 5144 - DNA, 358 bp, Cyanidium caldarium
  Clone ID: LIB190-056-Q1-E1-C12
acgcgtcagcccaagcgtccgatatttgataaaatcgatgtgaacggtcccaacgcatcgccagtttattcttatttgaaacgtgcctctcataccggcgatattgaatggaattatgtcaagttcctggtgagtccgcaaggtaaggttttacgttttgcaccttggacagatcccctgcaactggaaccacatatccgagcttggttgggttttactgaataatctatcgtgtgttccgtatctcttgttatgaaagtcgcgtcattctaaacgtgtttcttcacgcaagacacgactggatttcaaaagagataaataaatattatttaccattccaaaaaaaaaaacaatacac

SEQ ID NO: 5145 - DNA, 298 bp, Cyanidium caldarium
  Clone ID: LIB190-056-Q1-E1-C6
aagtttggttgttttcttggtagcagttgtacattcaacatcatcaaatgccaaagggaggaaagaaagattcttcaaagaaagaagccacaagtaaacctgcagcagcagatgctacaaagacgacagaaaagtctggtccggaagccaagttgaagggaactggtgcaaagaaacaataaaaagttgactatgcatgttcctgttatgttttgtgagttctgtttgatagtttccagctattcttttggtagtgaataaagagaaaattttttatatttacaaaaagtacaaaggg

SEQ ID NO: 5146 - DNA, 428 bp, Cyanidium caldarium
  Clone ID: LIB190-056-Q1-E1-C9
acgcgtacggtttagtctactcacgaaaagtattgcaccagttactaaaagcattttgttatccacagtaaagtataatagtcctttgcagctgagtaaagcagagatatggagagcttcttatccaactggaagcagacgttcctttgcagaacaaaaggcacagcagcagtccaaagaaggtgaagaaccaataacgccttatcaacctgtgacggagaagctggataaaagagacccaaactatccttggaagtggagaagttttcttccagaacatacctataaacccaacctcaatatcaatctggaaaggcatcatacacctttagattttagagatagagtagctcggggaatcgtcaagtttttaagattttttgcagatgcctttttttcagaaacgatacggacaccgcgctgttgtg

SEQ ID NO: 5147 - DNA, 316 bp, Cyanidium caldarium
  Clone ID: LIB190-056-Q1-E1-D1
attcgcggtacgacccacgggcccgtgtttgtgtaaggcattcctccagactgggacgatgccatgttggccaatttgtttcttccttttggcaaattgctatcttccaatgtgtttattgataagcgtacgcagagaagtaaaggattcggatttgtgagttatgcttatcctgattcggcacatatggcaattgttatgttgaatggaatgactttaccaaatggcagaacgctaaaagtttccttgaagaaggataaaaacgaaaatccaagcgaataaatgaaaatttcttcttttgggaaaaaaaaagcac

SEQ ID NO: 5148 - DNA, 429 bp, Cyanidium caldarium
  Clone ID: LIB190-056-Q1-E1-D10
acgcgtcagttcgaacatacattgatgctgtgcatattctgaaaaagaagaaaggccgcctctccaactcaacggactgtatggacaccactagtgactactatcatatcagttctgacacttccgaaaatgccttgtattattttgagagagaaaggatcattcgagagatatcccaagatccttttttgtacgacaagctgagtcgttccatagcaccatctatatatggacatgaagacttgaagaaaggtcttttgttacagctttttggaggaaccagcaaagatttttctatcagtggaggtggccattttcgcagtgacatacatattcttcttgtcggagatccaggaacaagcataagcttgtttcgtcagtatgttcacaggattgcccctcgtggtctctatacttctggcagacgct

SEQ ID NO: 5149 - DNA, 431 bp, Cyanidium caldarium
  Clone ID: LIB190-056-Q1-E1-D11
cacgcgtcagattcgaggagagagacagacagatggccaacgctggtcaagatggccttgtgcaagtcaacaaacatagaaaagtaaagagattgcaagaagataatattttgaatagagcactatcacaaccaggagatgtatttctgtgcttttgcaacatccagttgttggtgaatgcagaaagagctattataggaaatattacttgtccagaaagtatcgaattgtgtcgtctattagctggacatatagcggtttggttcgatgaacatttggatgactttcgtttggaagctatcttgggagcactattgtgtacttgttattgtgagtggaagcgttttgaacgagaattgggggtacaagaatggaatgaattggggaagatatcttccttagatacttggaagcttgtgcttggtacaaga

SEQ ID NO: 5150 - DNA, 228 bp, Cyanidium caldarium
  Clone ID: LIB190-056-Q1-E1-D3
attcccggatcgacccacgcgcccgacttgggggcattcttactcaggaaagaaacgttatgacaccgtggagaaggacacagagaaggaaccaagtatatttgagatacatgatctgtccaagaaacagagtggcagccaataagaagagagtttgtgagttttcaatacaatactgtgcttgttgttataattttccataaatgattgtacatgctgttttgttgg

SEQ ID NO: 5151 - DNA, 447 bp, Cyanidium caldarium
  Clone ID: LIB190-056-Q1-E1-D7
acaaattaaggtgagagaatggacgataaggaactaggcaaaaggatatggtatctgcggtagaacatatgaaagaagcagcaccgactgtttagcaaaaacacagcactctgcagaaaagagaaaatgtaaagtatagagtgtgcggcctgccaaatagtagagaagaaatcgatgaaagtgaaagcgagtaaaagatgaggtatagagaatggcggtcctaacggtaaggatccaaaggtagcgaagtaaatagacgtttgaaaggcgtccagtatgaaaggagaaacgagtgtagcactgtctagtcgtccaactcagcgaaacagcaataactgtgaaaatgcagtaaactagcagtaggacggaaagaccccataattcttgactagataggtttagggaggagagagaatcatgaagtagaggacgtggggtaagagatga

SEQ ID NO: 5152 - DNA, 429 bp, Cyanidium caldarium
  Clone ID: LIB190-056-Q1-E1-E10
cacgcgtcagagcggtggtcggctttttacgacgacgacgacatggtggttgcttcctgtcgaaacctttttgtactagagttgaagaacaaggaaaacttatagtatccgaaaccgaagatgatacccgattagatcgtttcttgagacgccgtattggtagattgcctcagtctttattagaaaaatatatccgaagaggagttgtaaagatagatgggcaagtagtaaagaaagctggggaaagagttcgttcttcttccgtggtgtatattcctagacaactagaaagcttggaggaaacaacaggggacgacaatgtggagagtagtcgcctccatcagggggatggcgctatgatgatggacagaaaggaaacaaccttgtctacccaagtaacaaatagagtacagagttgggtgctttaca

SEQ ID NO: 5153 - DNA, 427 bp, Cyanidium caldarium
  unsure at all n locations
  Clone ID: LIB190-056-Q1-E1-E11
acgcgtcagcccaagcgtccggggcgccgctttgtattttttttggttgggtttggtgaatcgatcctgtgttcgtcgacttttgtgtgtctcttgaaatggcttccaatcttcaaacagacggcaccaacgttcccacttttaaaattatcttggtaggagacggtggagttggtaaaacaacttttgtgaagcgacatctttctggagaattcgaaaagaaatatattgccactgtaggtgtggaagtacaccctcttaaatttcataccaatcgaggccctatcgttttcaacgtgtgggacactgctggtcaagaaaagtttggaggtttgagggatggctactatattcaaggacagggtgctattattatgtntgatgtcacttctagaatcacttataagaacgttgccaactggcatcg

SEQ ID NO: 5154 - DNA, 431 bp, Cyanidium caldarium
  Clone ID: LIB190-056-Q1-E1-E12
acgcgtcagcggaagcgtgggttaaagttggatgctgagagttttttgttccctgtgcatagtaattcaggaattggttggtggagaacaagtttccgtttatccgaagaaatatatacaacttgcgacggtggcgattttcacatgccacttgcactttgtctcagtggaaatgctcactgttttgcttggatcaatcagttgcagattgctcgttatgtggcaaatgttggtccacaaaatgtattttatattccatgtggcttgctgtatagaaacgaagaaaatgtcttgacaattatgtattatacagagcatgaaagtgcccaagttggtgttcgaataactccttactttgtggatagcaaaacggggaactggaaaactcacgacgaactgcagacaacggatgttgttggacctttcgcaac

SEQ ID NO: 5155 - DNA, 290 bp, Cyanidium caldarium
  unsure at all n locations
  Clone ID: LIB190-056-Q1-E1-F1
attcncgggacgacccacgggtccgcccacgcgtcagcggacgcgtgggaaagccaacttatagttttactccctgaatatagcttgaaaacaatcaataactgttcatattcctgagtatgtcttctgtctatccaaaatgttgcgctgcgaatctttatgactggagattatcgcctttctgaaacattttttagttatgttggattgttaagcatcgttcgtatctgataggctatttctgaaaggttttcagtagtgtaataaacaagaaatgaactaaaacaaag

SEQ ID NO: 5156 - DNA, 450 bp, Cyanidium caldarium
  unsure at all n locations
  Clone ID: LIB190-056-Q1-E1-F11
ggtcaggaattaccgggccgagccacgcgtcagcccaagcgtccggtcaggtatctccaaatttgtgcaacggcttcaagaagtcttttgtcaaaggaatcgaaagggctttgccgatatttgcacgctacgaaagtttctcaggcgtctaatgtgatgtgccgagatgcccttaacagtgcgcttgatgaagaacttgaacgagacgaaagagtttgtattattggagaagaagtaggacagtaccaaggcgcctacaaagttactcgtggcttgtatgaaaaatatggttcaaggagaatagttgatactcctatatccgagatgggtttcaccggtttggctgtangagctgcattcaacggactaagacctgtttgtgagtttatgacctttaactttgcaatgcaggcgatcgaccagatcatcaactcggctgcaaagacatat

SEQ ID NO: 5157 - DNA, 284 bp, Cyanidium caldarium
  unsure at all n locations
  Clone ID: LIB190-056-Q1-E1-F4
attcncggatcgacccacggcgcccgaccacgcgtcagcgggaaagcagtaaaagaagaaagagaaaggaaaaaactgagtatcaggaagaaaagagggagtagatgaggaaagaaagatcaaggaagtaagagtaagagaaggagtaatgtgaatgaaagcaggaaagtatttgaagaagagagtgtaaagcgcgtaccttttgcataatgtcccagcgagtgaaagaggaagcacaaagaaagaagaagaagtagccaggtaagacccgaagctagttgaat

SEQ ID NO: 5158 - DNA, 425 bp, Cyanidium caldarium
  Clone ID: LIB190-056-Q1-E1-F6
agtaccggtctagaattcccgggccgacacacgcgtccgcccacgcgtccgcccacgcgtccggccaaggcaggttttgctcgaagctgcacacttgggattgcgtggaggcaagttgtagcacctttggtagttttctcattacttttcgttagttttggaaaacgggtcgatgttctaaaacagaaacgtgtcctttaaggcataaaatgtgcgtactgaggaacagaagctgatagtttatgcggcactgtgaaaagtccaaaatacacatatcttgtattgaaacgaatcatatagtttttgtgacagcttccgcagtcagttttctaaaggaacgaaagaatgaaaatgtttcgtaattaaaattcatgagatattgatacatttagtaatacgataaaatcaaacttctggtccctgtc

SEQ ID NO: 5159 - DNA, 452 bp, Cyanidium caldarium
  Clone ID: LIB190-056-Q1-E1-F7
acggtcgacaattcccgggtcgacacacgcgtccgattcgtgattgggttctttatctattatttttcctacaatcctagttttggaaccttggcatgggtcgtcaatggagagttgtttgagtctcataccagaaacttgggaatggcatcttgtgcgttttggatctttgggaatgcagccatttcaacctatacttttagtagacagatcgaagcgtacggcactgtgggaacatttggtgtgtttgcagctattgtgtttgtattttgggtgatattcctctttgtgtttgtggacacttccaagttgagcctggaagatgtgaaagaacgctttgaaggtggaatgagcgctatcgtaagaagaaatacgagagaaatgacaagacacgtgcaacgcatttgtgggaaatatttgggaatggaatacaagggaccatagcaagacac

SEQ ID NO: 5160 - DNA, 431 bp, Cyanidium caldarium
  Clone ID: LIB190-056-Q1-E1-G10
acgcgtcaggtgacattctttggaaattgttggtgaaatatgacaggaagaggaaaaggtggtaaaggtcttggaaaaggaggagccaaacgtcatcgtaaagtacttcgagataatattcaaggtattacgaaacctgctattcgacgtttggcaagacgtggtggtgtaaagcgtatatctggccttatctatgaggagacaaggaacgtgttgagagtgtttctggaaagtgttattcgtgacgcagtaacttacacggagcacgctcgtagaaagactgtcactgcaatggacgtggtttatgctttgaaacgccagggtcgtacgttgtacggttttggtggttaagaggcaaacaaagacatggtgtttttcaacaacaccagttgtgaaagaaacttgggtttcagtctcagtagacccttcct

SEQ ID NO: 5161 - DNA, 424 bp, Cyanidium caldarium
  Clone ID: LIB190-056-Q1-E1-G11
acgcgtcagcgtcacaacccgtcttagtgctttgcgacttccaaaatgatattatgggtttcgttccccctgagaagaaggaagccgtcattaaaggagcttcgaaacttttgaactttgcccgtgagaagaagatccctgtagttcatgtgggggtacgttttagaccgggacaccctgaagtttcgaaacgaaacaagatgctttctcttgtttcctccagaggccccatccttgtggaaggtactcctggaagtgaccacgtagcagagttgaaaccaattgaaggtgaattcagtgttacaaaaagaagagttggggcacattataataccgatcttacaaccattcttagcgctttgggcgctacccacctgattttgggaagtggttctacaagcggagttattctgtcgaccgttcg

SEQ ID NO: 5162 - DNA, 252 bp, Cyanidium caldarium
  Clone ID: LIB190-056-Q1-E1-G2
aattcccggatcgacccacgcctccgcggacgcgtgagtttgtggttgctgttggtgatcgacacgaaagatattatcgtgaaccaaattcatttatatatcattggagaatgagtcccaaaaaggaaacaccgcatactcccaaaggaggctatgcaaaagctgtacttgatagcattgttgctctgaaggagatgaatgggtcctctccacaggccatcataaaatatgtcaaggctcacaatccgcagc

SEQ ID NO: 5163 - DNA, 441 bp, Cyanidium caldarium
  Clone ID: LIB190-056-Q1-E1-G3
attcccggatcgacccacgcgcccgtaatgggaataatgggaatgataaatgtggtaagtaggtcatataaaagcatggagtatatggagaggataagagaagagagtagggtgtatgtaggaatgagtataataacaggaatgatatggagtaaagaagtgtggggatcatggtggataaatgatgtaaggaatataagcatgttagtatgctggatatggttggaagtaataggaggagtaaagaaggagtacagaggaataataagcagtataggaataataaatataccgataataaagtactcagtagagtggtggaataccttgcatcagccagtgagtataagctcatggggaggaagtataggaagagaagaagtagaagaaatagtgaaggtaataataataggagtaatggtgagtatacagaagaacatg

SEQ ID NO: 5164 - DNA, 308 bp, Cyanidium caldarium
  Clone ID: LIB190-056-Q1-E1-G4
attcccggtacgacccacgggcccggggtcatgttaccagaactcggaagattatggacacacgcatcgtgtttatgggtgccaaggctttggaaaatgtattgaatgatgccggattgcaacctgaaaaatcaagtttctattttgtgagtcattccaacttgaaaaagatcggtctaggtgaaaacgaaatttggatcgacttgcaataactatcgtttgacagcgtttttctaatgtggtctcttgagtgtggataaaataccttgtttcaccttaaaaaaaagaaaacagaaacaaaagaaaca

SEQ ID NO: 5165 - DNA, 489 bp, Cyanidium caldarium
  Clone ID: LIB190-056-Q1-E1-G5
cgccggcaagtaccggtccagaattcccgggtcgaaacacgcgtccggttgtgggaaacaacagctttgtggtgtagtgttgccatggtttccaaagaagaacaaaacttggcaaccacgtttcagtttgaagcacgtttgactcaagccagtctaataaagaagatcttggaggccatcaaagacttggttaccgatgcaaactttgactgttcggctgaaggtttatctttgcaggcaatggactcatctcatgtctccttggtttcgattgttcttcacgctcaagggttcgaaatgttccgctgtcaacgagctgtttctctgggtatcaatctggcgtcgttaaccaaaatattaaagtgtgcaggaaatgatgacagtataacgctaagagcagacgacaagggagataaggcggagtttgtgtttgaaagtcaaacgcaagaccgtctttctgagtttgaactgaaactgatggacatcgat

SEQ ID NO: 5166 - DNA, 464 bp, Cyanidium caldarium
  Clone ID: LIB190-056-Q1-E1-G6
ttcccgggtcgaaacacgcgtccagataatgttcgacttcgaatcaagggaatggaagaggaagatattcggatgggatttgtattgtgtgacaccgatgctttggttcaaggcactacgttatttgatgcacaaattatgcttttggactataaaaatattatttgtgctggatacagttgtgtcatgcatgtacatgcagcagtcgaggaatgcacgattgaaaagttgctggcacaagttgatcgaaaaacgaaccaagtgatacaaaagcgaccaaaattcttaaaaccaggaatggcagcgatcgctcgcatatctgtagcgcagccaatttgtatcttacctttcaaagagtttccgcagttgggtcgatttattcttcgcgatgaacgaaagacagttgcagtaggaatcatcctgaaagtggggcgtactaatacgatagagtagcactctcacac

SEQ ID NO: 5167 - DNA, 233 bp, Cyanidium caldarium
  Clone ID: LIB190-056-Q1-E1-G9
gtcaggaattaccggccgagccacgcgtcagcccaaacatccgggcaatacaactggatggcagttaatcttataatatgggaaattccagtcacatgtcgcacgaaacagcactgggtcatgaacactcgagtctatcatcaaaggcatctcgtcgtgacacgagcttcacctgctacacgtggacacacgaatattccgcactcggatgggacaagtcgccataatggcca

SEQ ID NO: 5168 - DNA, 443 bp, Cyanidium caldarium
  unsure at all n locations
  Clone ID: LIB190-056-Q1-E1-H1
attcncgggatcgacccacgggcccgaccacgcgtcagcccacgcgtccgcccacgcgtccggaaaagagagagtgtgtgtgtggttaggaaatgcacaatgtcattgacagcaacgttcaagtttagtccacctcctgtgcatgtcaaaagagaacaaccaatgtacaatctgatacttgaatatgcaagaagaaaaggaatagacagaattgtagagatgaacggcaaatggtggatatatactaggacacctcccaatcgaaaggcactgcggtattggtatgacatggactgcgtggtgttgaacccagtcaaggagttacacacggccaaagcttatgcgagaagactaacagaagcactggagaagagaactattgtcgaattgcccagacaagatatttgtgtacgacgtagcgaccggaagaaacacggagtggc

SEQ ID NO: 5169 - DNA, 433 bp, Cyanidium caldarium
  Clone ID: LIB190-056-Q1-E1-H11
ccacgcgtcagcgagcagaagattcaacaaaagtattgctctcgctatgttactgaagaagaagtacaaagcaagcagtgcatcaagtatgtatctcttcagaagatcaagtacgagtcttgctctgctcaatatgaagttcaaaagatcaagcagcaacaatgtactatgacagtctctgaacaatacatacagcccgatacttgctacaagtatgtccctgaacaacaattggtgcctcatacttgttacaagtattattctgtacccaagtttattgaaaagtgctatcctcagtatgcaacaacggagaaatgtgtagagtatgagtatgttccatatgccacttctacaccttatccatcggtatctccaagttatactccttcagcatatcaaacaacttctgcttattaaagagccgaagactgga

SEQ ID NO: 5170 - DNA, 300 bp, Cyanidium caldarium
  Clone ID: LIB190-056-Q1-E1-H4
cacgcgtcagcttaagcatatcattaagcggaggaaaagaaaccaactggaattcccctagtagcggggagcgaagcgggaagagcccactatgagaatcctctttttcttttgtgaaaagaagagatgtatttgaaaaaagacaagaaatatctgcagcaagaaaagagcaaatttcctggaatggaatatcatggacggtgagaatcccgtgtatctcttttctttgtattcaaactgcgttacgatatttcttgttgtggagtcgggttgtttggtattacagccttaattttgtgg

SEQ ID NO: 5171 - DNA, 432 bp, Cyanidium caldarium
  Clone ID: LIB190-056-Q1-E1-H6
ccaagtacggtctacaattcccgggccgacccacgcgtccacccacgcgtccgcctcgctattgtcaagttccatacgttgtgtagaaatggagtcggagattagaaattggctgcttgctataggacaacttcaaggaccatacacagagttgctaaaaatttatgagttggatagcgaacagttggatgtttgtgaaggtttgttgtcccaccttttgaagcaacaagaatattacagaggagaacgtcaggaatgaggtattcgcatattagaacgactttattgccaacttcattctctttgcaccaaagtctttaccgcctcattcacatcttggaatacatagtctgcaaggtctctagggtcattatctccgtcttccgaggagaaacaaccttgagggacataaatataaaaacggattattag

SEQ ID NO: 5172 - DNA, 475 bp, Cyanidium caldarium
  Clone ID: LIB190-056-Q1-E1-H7
tacggtcctacattcccgggtcgacacacgcgtccgggcaacagcagcgcttgtcgttgtggatgttcaaagagacttttgtgaaggaggcagtttgcaagttccaggtgctgaagaaataataaaacctattaataatcttcgtagcatttttgatgtggtagcttttaccaaggattggcatccggaaaatcacatatcatttgctaagaatcatgtcggtcacaacatatttgatactactgaagatcaccacggagtgaagcaggtgctttggcctgtacattgtgtccaacactccaaaggagcagagtttcatccacttttaattcataaagatagtgacatactgattcacaaaggagttgatccaaatatagactcttattctgctttctgggacaacgcagaacaaaggcagacggaactaaagaaaaggctcgtcgagaagaatatctcacagttatacgtttgt

SEQ ID NO: 5173 - DNA, 429 bp, Cyanidium caldarium
  Clone ID: LIB190-056-Q1-E1-H9
gccacgcgtcagctttatacggaaaactttcaggaagtgttgggttgatatttattttgacaaaatcagttgaactcatatttattttgacaaaatcagttgaactcatatttattttgacattattccaccatcagctgtgaataaaggcaaataaacttaccctcatgttggatatttataggttattcgtaaaagaaaaaagagtaaaagggagactcaagtatagcagtgtagagtactttgagaggaggctgtatatataagtttttgaggaagaagagccttctaggcagaagggtgaacacaattgtttagagattccagactcctagatcttgggtaaagaagaagagtacgaaggagactcaagtatagcagtgtagaatactttgagaggaggctgtatatataagtttttgaggaaga

SEQ ID NO: 5174 - DNA, 347 bp, Cyanidium caldarium
  Clone ID: LIB190-057-Q1-E1-A11
ggttcctcttgaggggaaaattgtggttggtcggtgaaaaccatggtggcagcttctccttctcgcaagttggaaatacaatgtggagtattgaaaagaacgttgaaagatatatccgcttatcaaaaggagtttaccgagatgaacgagcaaatacaacgggcaacacccgatcaaccatatcagcaatggcaaaaagtgttggcagaaacggacagaatggtatcggactcgtatatgacgttatcggaagcggtacacagtttacaaaagttgcaaacgcagatggacactttgcgaggaaccacacactgggaacaagcctacgcgtctgctacaagaagcac

SEQ ID NO: 5175 - DNA, 360 bp, Cyanidium caldarium
  Clone ID: LIB190-057-Q1-E1-A2
tcaagacatgtttaggattgacagattgagagctccgtcttgattgaatgggtggtgggtgcgacgtctaggtgaagagttggtagattggagtggtgctggtggtttcttttagtggtacgtttaggagcgggatcgagggaggaggctaggacctcggttatctggcaagcgtttaagcgagcgggggggtgaggggaaaggagtggacgagggaggacaacaggagggggagggggacacatggggggtgtgtggtcttctagcgaagcgagctagcgagatggccagcagcagctttgcagaaacgaagcgggcgacgagacgcaaagaaacaacccccgcggagttgtgtagttg

SEQ ID NO: 5176 - DNA, 431 bp, Cyanidium caldarium
  Clone ID: LIB190-057-Q1-E1-B12
gacccacgcgtaagcattttggcgcccaatagaagatgatgtctacaaaaggccgtctcaatcaaatcaagaaacttcactttccaaagtaacagtcgaagaatttttctcatgaatgtacgtgggctggttggcaacaaaatttgagtgatcagcataaggaacaagataggtatgggatgaatagataccatgcatatcttgtcaaagtaaactatctatagatgtggaggaaactagagcatactgacaatggagagctcaaggaatagttgcaacagtcattctatgtcatgtcctataaagagaaatgcggaattgtgtagcaacaatcagctgcgtgttttgtgagccaataatagtattgagcgcacgagacacatgatcccgacatgagcctaaaggcatttcactgcacatgaggacatgtt

SEQ ID NO: 5177 - DNA, 363 bp, Cyanidium caldarium
  Clone ID: LIB190-057-Q1-E1-B4
ttcccgagtcgacccacccgttcgcccacgcgtccgcccacgcatccgaggtgtccgctgggataggcatatttatccgggttatacgataccgccaaactatgacagtatgattggaaagcttactgtttcggggcccacgagagacctggccatccgtaggatgaaaggcgcactagatgaaatgaacattgcgggtgttccttccactattccttgacgcagggctagttgtcagcagtgagagattcattgaaggcagggcggttgacacaaactttcttgagacagaagacattcgttcccaactggtggcagcggtatctactttattgtaacgaaagaaggagcgtacttttcgcg

SEQ ID NO: 5178 - DNA, 426 bp, Cyanidium caldarium
  unsure at all n locations
  Clone ID: LIB190-057-Q1-E1-B7
accggtcaggcattcccggcccgacgcacgcgtcaagatggaggcaaggaagtgacgcagtagatcagggagtaacacatgcaagtaggtacagcgaacgggtgagtggagaggtgtcaaagagtgggagaacatgatggcacagaagaaggtaagaaatggggagagtaaaaggcatagcgggaagtaaaagcgggaatctgagaggaggaaagccacattggagcggagaaaacggccaaggagggagaagtcaggagtggggaaagagtcggaaggtacagggagagtatgaccgagtaatgaagagtggagtaaacaggaaaggagctgaaaggagggaatgaacggaagttagggganaaacacgtgccagcagcaacggtaaaacgtgtgtagcaagcgtagaacggaagaactgggtgt

SEQ ID NO: 5179 - DNA, 388 bp, Cyanidium caldarium
  Clone ID: LIB190-057-Q1-E1-C4
attcccgagccgacccacacgtccaattcaatccatttcgattgagccgttttgcgattttagatacgaaacaaccaaggtattatctctgccgtgttgctttcttagctttcatactcgccgcttgtttcgagggacaagtgtttgctgctaagaaaagcgaagctaaggtctccagcgccacgtctccaacgccagttgctgaaagcaacaatgaggagggcttctcagactagcagagaactcggcgctgacaattgggagaagacgttggatggatggagagctgcagtagttatgttttatctttcatggggtgatgattgtaaggatatggagccgcattttcaggggcttgcagaatctgcctctaatgaagttagcgttg

SEQ ID NO: 5180 - DNA, 432 bp, Cyanidium caldarium
  Clone ID: LIB190-057-Q1-E1-C9
gacccacgcgtacggcggaagggagtggagtggcctattctatggcttttgctttgcgtggtctagcgagtctttcaagtcgtttgagtacttggaaacagggttacaagattgtaactgttgcaaataattttgaacgagaaagaggactgcgactggtgagttccttccaaagtgcgcggcagtggacttcgttgcaaggtttgttatgtcgctatagaagtgacagcgttgtggagggagggaaaaagcaaaagggagtcgctactgaaagaagtcctgtttctacagccattcccatgggttatgccgatgaatatttccatcacgtgcatcgttggcgtccaggagatccaagtaaacgaacggtagtctatttgtggttgggaactgccaagtttatcactgcttgtattgctcgagtaataatcc

SEQ ID NO: 5181 - DNA, 429 bp, Cyanidium caldarium
  Clone ID: LIB190-057-Q1-E1-D9
gacccacgcgtaagagaggaattggaaggcgattgcttgccgaaagagcctacacacacaaaagtgttttgtcgtataggtaaccaattcttcttgttccatgtccaaactgcaaacagctaccgttcgttctgcagtagcagagattttaaaagagtcacaagagaagaaacgcaactttgtggagaccgtggaactccagataggactcaagaactacgataccaaaaaggataagcgttttagtggttccattaagctgccatatattccaaaacctaaaatacaagttgcagtattaggagacgcaattcacgtacaacaagcacaggaacttggcatcgatgcttatgacgtggaagccttgaaaaagtttaacagacagaagaagcccatcaaaaagttcgcaaagaaatatgacgcttttct

SEQ ID NO: 5182 - DNA, 409 bp, Cyanidium caldarium
  Clone ID: LIB190-057-Q1-E1-F12
gaccctagcgtaaggagagtgtgtttgtgagttgtgtgtggtattgttgttttacgtctttgtgagtgaccactcgtaggagtgtgatgaatcctcacaaagatgatagacgacagtaggacgatgttgttttggtataaaacacccacgggacacacacacaaacccccaccgcacgacaacaacacacgcaaaacaccaccccacaccaaccacacaaaccacacacacaaacagggcggcccccctaaaggatccaccctccccctgccgtccatgcaacctcacacccctcccacagggtcccccaagttcaactcacgggccgtcctttcacacccccctcaccgggcacaccccgggcgtccccaacttaaaccccctgccggaaaacccccccttcccccca

SEQ ID NO: 5183 - DNA, 403 bp, Cyanidium caldarium
  Clone ID: LIB190-057-Q1-E1-F4
cgacccaggcgtccgcgttttttttttttgcgttgggccacgcgttagagaaagcaaagctgggcaagtttccgcgactcaaagagagtggcttcttagaggtggaaaatttttttcaggaacttgtcgctttttcttgggcttctagagaatccgtgaaagtcgacatcctacctatgaccccgtcgaggcaaggaaatatgcacttggtgtggaagcatacaatcatgttggatagtcttatattgatgtccgtttgtatgccttcctttgtggcgaacgaaacagtacgtaaggtgcccttgagtgggagaattgcaacaggcatgcagtgcgtacagggcgatcgtgcgaatcgtggtggtgtttcaacaaaggtgatagaaatgcaaccgtcgtgttt

SEQ ID NO: 5184 - DNA, 394 bp, Cyanidium caldarium
  Clone ID: LIB190-057-Q1-E1-F7
acggtcaggcattcccgggccgacgacacgcgtcaggtaggggctacgaccctcgttcacgaggcattcggcccaaaggatagtcacaagagacgtttcccttgacgcatctgcagaaacagaaacagagaaagtgggatttcgagaaagactccgacaagtgaggggaaatcgtagtggcgcctacttgggaaaacgttaggacggagtaaaaccaaagcgagaggaagaactggacgcaagaggattgtgtcgtagagatgggcaggtagcaggaggaagctggttggcgtgaggcctttcaggccagggtattcgcggattagggccctgaacactatggagcgagaaggatgggtggacatgaacgactttaatattaagatgggggaaa

SEQ ID NO: 5185 - DNA, 350 bp, Cyanidium caldarium
  unsure at all n locations
  Clone ID: LIB190-057-Q1-E1-G2
agagtggaagaacaggagagcacagaagaatgtaagaaatggttagagtaaaaaccagaaaggaagtagaagcgggaatctgggacgangaaagccacagtggaactgagaagaggtccaaacgggagaagtcagcagtggggaaaattgggcaatgtacagggaagtatgacgcagtaatgatgagtggagtagacacggacggaagtgaaaaggacggaatcggcggaagttagggcaaaaacgcgtgccagcggcaggcgtaaaaccgtgtgtcggaggggtagagcagaagaactgggtgtaagggtcgagtagtacagtaagtgtaaaagggaaaggaaaggaga

SEQ ID NO: 5186 - DNA, 431 bp, Cyanidium caldarium
  Clone ID: LIB190-057-Q1-E1-H9
gacccaagcgtcagcccacgcgtccgcccacgcgtccgatactgtccgtggtgtaaaagagaactgccaaaatgctgtatttgtttgttccatctgtcttgttggaaccctgcgtatgatccacctgtcactttagataagcagtgcgatgcaaagtattctccttgcacgctagagaataacaaccattggtttacttggtgcattcgttgtcgacacgcaagtcacattcaccatatattacagtggtttgattctgcaaggagagaagaaacgtatgtttgtccagtgtccggttgtaattgtcgatgttggatggaaggaggaagaatggcttgagggtgcggcaattgtcttcccacgcgctcggcttgttgctgacgcgtgccaaattccttctttcggccgcatattatttcccccacagagca

SEQ ID NO: 5187 - DNA, 322 bp, Cyanidium caldarium
  Clone ID: LIB190-058-Q1-E1-A4
agcgtacacgtccacacattgtccgattgacttgaaaaacacgaagaatgggaaatgttcacggttctcttgctcctgctggtaaagtacgacgtcaaacacaaacggttccgacacaagaaaagaataatcgtccaaaagggagggcttggcaaacactcaagtacaataggcgttttgtgagtgatgttgttagttttggttagagaagatgtctcaacgccaactcgtgaagcgactgcaatgagaaagacagtactttacagcgatttacgtctgctaaatgcttgcgggcagccgctctagaggatacaaacttacg

SEQ ID NO: 5188 - DNA, 291 bp, Cyanidium caldarium
  Clone ID: LIB190-058-Q1-E1-A5
aattcccggctcgacccacgcgtacgggccaatcaaagctagtgatagctggtactcctcgaaagctatataagtagcgtatgcaggaaagaagaaggtaaaggaagagaaggaagaagcagagagggactatgagcgagaaggtggatagtcgagagggaaaaagcccagaagccaagataaggtatcaaagtaaagaaagaaggaaaaggagaagaagagagggtaggcttagaagcagcaaaccagagaggaaagcgttaaagcatgaaagaaaagaaatccgaaaaa

SEQ ID NO: 5189 - DNA, 341 bp, Cyanidium caldarium
  Clone ID: LIB190-058-Q1-E1-A7
aggaacgtacgagaaagccaagtgaggaaaagaaggcaagtagagggcggcccgagaaaggagagggcgtaagacgtgatacagagtaggaagaaaagagaagagagctagaaaggaggtaaaagaagagtaaaaggactagaagaggtacggaattcacgaggaaggagcgtgaaggaaggaggaatcccaagtaatcgaggaagaaaaagcttcggtgaaagcgtgaacggattttgtacacactgcccgtcaagttctggaagtgtgctaggaataagcaggagaagtagaagagagtaggaaaagaagaaaggaagtgaagacgtaagacgtgaaaa

SEQ ID NO: 5190 - DNA, 429 bp, Cyanidium caldarium
  Clone ID: LIB190-058-Q1-E1-A9
gacccacgcgtaagcggacgcgtggggtggttcgagagataccactatacatcatcacgacgttcgtatcgcacaacatcacattgaaacacttcgaggacacgaacaagaagtttgtgggttgaaatggaacgtcgatggaactcagttggcttctggaggaaacgataatttgttgatggtttgggataatcttcactccagtcaaccaaaatatcgtttagatcagcatcttgcagctgtaaaagccattgcttggtgtccttggcaatctcatttacttgcaagtggtggaggaacagcagatagaacgatcaagttttggaatactacaactggctcctgtttacagtccatcgatacaaaaagtcaagtatgtgctttgctctggaatagacattgataggagatcgtcagcagtcatgggtt

SEQ ID NO: 5191 - DNA, 437 bp, Cyanidium caldarium
  Clone ID: LIB190-058-Q1-E1-B11
aattcccggctcgacccacgacgtccgcccacgcgtccgcccacgcgtccgattggatgatgcagaacatagcagtaagcgaaggtgaactaatcaagattagaaacgccaatctacccaaaggaacgtttgtcaaacttcgtccacaaagttcggagtttctagctatatcggatcccaaagcagttttagaagcgagacttcgaaacttttcttgtctacccaaggagatacgatcgctattcattatttgaacagaatttattggatcgatattttgcaagtacagccaggagatgccataagtattattgatgcggacgtgaatgtggaatttgctccgcctgccgatatggaaacacagcgccagtgaaaacaatactgcaaccaatactattccttctaattctcattctacaaatatggaaagcggagac

SEQ ID NO: 5192 - DNA, 393 bp, Cyanidium caldarium
  Clone ID: LIB190-058-Q1-E1-B12
agcccacgcgtccggcgaacgggtgagtaaagaggtgtgaaagagtggaagaacatgaaagcacagaagaatgtaagaaatggttagagtaaaaaccagaaaggaagtaaaaggacggaatgaagggaagttatggcaaaaacacgtgccatcagcagcggtaaaacgtgtgtagcaagcgtagagcagaagaactgggtgtaaaggtcgagtagtagagtaagtgtaaaacggaaaggaaaggatagaaagaggaaagggatgaaatgcagagatctctagagaaaagcaagacagaaaagacaggaagacacagtaaatgatgcgagaaagcatacgaagtgaaactgattacgaacccgtgtagtctatgcagtacatcaactcccaatc

SEQ ID NO: 5193 - DNA, 331 bp, Cyanidium caldarium
  Clone ID: LIB190-058-Q1-E1-B4
gtggggaaagaggcaatgaaatggcagaagccttgagagaaataagtggaagactggcggaaatgccggcagatagtggttatcctgcatatttggcagctagattggcaagcttttatgagagagctggtaaggtatcttgtttaggctcccctaatagacaaggttctattactattgtgggagctgtatcaccaccaggtggtgacttttcagatcctgttacgtcagccacccttggaatcgttcaagtcttttggggtttggataagaaactggctcaacgaaagcattttccttcggtcaattggctcaacccctattccaagtt

SEQ ID NO: 5194 - DNA, 344 bp, Cyanidium caldarium
  Clone ID: LIB190-058-Q1-E1-B5
gacccacgcgtacgggtttcaccagtcgggttgacagatcatcacaaaccatggaacaaagtcaaaaacagtgcttatggcaaacgacaggtgaaagtaatatcccttgtaaaaaatgaccaagtgatagaaaagttatacaagaaagtggttgtgtgtatacgacaacaaagttattccttggctttgaatacttgcagagcagtattggaaggtggtctcgactgcctggaagtctgcacttgtttctatccaggttgatgtacactcacatactgactagataacactaacaactccggatgcctttgagctgattcatacagtcgctagtgagtatcccc

SEQ ID NO: 5195 - DNA, 407 bp, Cyanidium caldarium
  Clone ID: LIB190-058-Q1-E1-C10
taagaaaggaaatggtgatggaataacttctgtttcatttagtcctcgttctccttatcgtattgcgactggttcgttggaaaagacagtgagagtattcgatgtagagaccggtgaacttttgcacaattttcgtcaacatgcagattctgtatattctgttgccttttcgagtgatggaagatatctgctatcaggttcacttgataagaacgttatattatgggatcttgcagctccttctccaaataactatacaattttcaaaggccatactgactttgttttgtctgtcgcatttagcttagatggtcctcttctcttgagtggcagcaaagaccgtactgttactttctgggacccgagaattccttctggaagtattggcatattggaaggacacaaaa

SEQ ID NO: 5196 - DNA, 167 bp, Cyanidium caldarium
  Clone ID: LIB190-058-Q1-E1-C3
acgcgtcagcccacgcgtccgcccacgcgtccgctttttttttggtgaaagaacatggcacttggaaatgaataacgccgttcaaaaaaatgcaagggagtgaataccaggttgactgttgagtttctttcaactgaatcccttacggcagttgctaccagtcatct

SEQ ID NO: 5197 - DNA, 304 bp, Cyanidium caldarium
  unsure at all n locations
  Clone ID: LIB190-058-Q1-E1-C4
gtggttggtgacaacgacaggtttcgacgtcgacgatgcctaaacaaatcaaagatatcaaggaatttctgcttttggtccgcaaaaaggatgccagagccatcacaattaagaaaaacaagaccaacacgaaattcaaagtccgttgcagcaaataattggaaaacttggtaattaaaagaaaagacaaggcgaacacgttgggacaaagtcctccacaagtttgactttgaaaaagattgattagacataaactctatcgttgttgttcttgtanaananatnnnnnnnnnnnannnnnnnn

SEQ ID NO: 5198 - DNA, 348 bp, Cyanidium caldarium
  Clone ID: LIB190-058-Q1-E1-C5
aattcccggctcgacccacgcgtacggtctcatatgtgtcgattttacgtcaaaacagtaacgcggatatgagatagcattctaatgagagtcgaggtaccgagagtttgttgggaaacctaaaatttacgtccatttgtgaagctttcaaacatatctcttttctcttgtataacggaaatgtgatttcgagagagagagagagagagaagcataaggcttcgactgatgaactttaaagtttcattcggaaaaatagtgcagtaggcaaaatgcaaacttggtaaaacttgggctctcaagctcctgggataggcggcaattatgtcttgtccctcgattcctaat

SEQ ID NO: 5199 - DNA, 337 bp, Cyanidium caldarium
  Clone ID: LIB190-058-Q1-E1-C7
aattcccggctcgacccacgcgtacgcccacgcgtccggggcaattcgaggcgccaagatgatgtaatgacgtgaacaaggtgcttgtgaacaacttggtcactatgattttgttgttctcttcaaagtcaaggagtttttagtaaacatattcgttcccttagctttacaattcatggacacctgttgccacagttctttgtctgcaactctcttggagggtttccccgagtcgttaccaccaaagtttttggtggagcacctcgaccagttgcttgttgtggacctgcgttgctctcaactgtacagtttgggacacattagacgttcttacagt

SEQ ID NO: 5200 - DNA, 437 bp, Cyanidium caldarium
  Clone ID: LIB190-058-Q1-E1-C9
aattcccggcctcgacccacgcgtacgcccacgcgtccgagtaccttgaaaaaggaacctcatcggttgaacgaaatatctgaacatatgctttctgattctcaaaagcgagctttgttggagtatttgacctgttgtggttgtcattgtgcttggaacgcacggcctaatgctccttttattgtttggaaggcaaacgatagttgcatggaatacaaggtatattggtattccaagaaagatggaaggaagattcatttcgattgttgggagtataacagcaatgaacgcatactttacggttgtgaagagcagcaggtggcttccgattggaatttatgtgtagaatatggcaatgttcttactgtgtttttaagtaattcggtatagatacaaagcaacagtgtgtgtgtgtgtgtatgacaccacaaaatggt

SEQ ID NO: 5201 - DNA, 450 bp, Cyanidium caldarium
  Clone ID: LIB190-058-Q1-E1-D12
aggtaccagttacgaattcccggctcgacccacgcgtacgctttgtcgagggagaggattcttcctgttctcatgtttgtggtgtggtttcctgcaagtttggtatggaaacaaccagcaacaactactcaaagaatttcaagttatcactggataactacaaaatggatatctttgaaaatgaaacgtcattcttctccaaaccaccacaccgtaaggtttcctctccgcatgatgaactcggagaacaagacgcgaccccgttacttgcaatagttgcctttgattcctatcgacgaaatatactcgaaaagttttcgttggaatcgaattggttgctatgccttgtacaacggtgaccaagcactttgttatgtaggttacaccaaaaacttgcaaagaaagattgcctttcacgccaagttgcaaccagacaattgcaaatttttc

SEQ ID NO: 5202 - DNA, 393 bp, Cyanidium caldarium
  Clone ID: LIB190-058-Q1-E1-D4
atcccgggccgacccacgcgtcagggcctgccaaatagtagagaagaaatcgatcaaagtgaaagcgagtaaaagatgaggtatagagaatggcggtcctaacagtaaggatccaaaggtagcgaagtaaatacacctctgaaacgcgtccagtacgaaaggacaaacgagtgtaacactgtcaagtcgtccaacgcagcgaaacagcaataactgtgacaatgcagtaaactagcagtacgaccgagagacccagaactcctgactagatacgtttagggacgacagacaatcacgaactagatgacgtggggtaagagatcaaagaccactgcatgacgataaggactctaactgagtaaggaaaataagcttaagctagtttggccgggg

SEQ ID NO: 5203 - DNA, 368 bp, Cyanidium caldarium
  Clone ID: LIB190-058-Q1-E1-E7
aattcccggctcgacccacgacgtcagcccacgcgtccggaatcacacatcatgaccaacagcaacgtcgcctttgtaaccctcttgtctccaaacactcctagaaataagcttttgttagggaaaagacaacattcatgtaaacatccgagtcacaatagttatacaaagtatcaagatgctgctttcaagtgcttcccactgcaagcaaaggaagatggccaaaagggaggtggaaagttcaatccttttgcggcacttggaaatgttgggaactttatggacgccgtgaagaaagcacaggagttttcaaaggaagctggaaagatgcaggaagagttatcaaagacagagctgaaagcttcttc

SEQ ID NO: 5204 - DNA, 442 bp, Cyanidium caldarium
  unsure at all n locations
  Clone ID: LIB190-058-Q1-E1-E8
aattcccggctcgacccacgacgtccggtgtttttgggaagagagacaacggaacacccaagtcgtacttgaagcttacacacacaatgacttcacactatcatcagatatgggaaacgttggtagttgccaaccaacagttgaaacaatggttgcataaaaaccaacctttaccaaataccaccactactactactacccaagacacgccacaccaaacgagtcaaaatagttcacaagtagagttggaaatggaaattgtcaaagaattggaacaatccatgtcggaaataggttctgtcgatagtttgctanggaaagaactggatacaagtcgtctggatgacttgtcacaacaacgacaacaactgttggaggatgcagtggaatgtgaagatgactatgtattgcttcatcgagatacgcatcgtcacgtatgtaa

SEQ ID NO: 5205 - DNA, 362 bp, Cyanidium caldarium
  Clone ID: LIB190-058-Q1-E1-F5
aatgcccgggctcgacccacgacgtcacgggaaaaagatacctcatactccggtcatatgagagatgagcaacgacggccaacatgagcaacgtggtcgtggtggtgcatcgctgcatcaaagtgccaaaagcttacttgtatgcgaagaaaaagaacaaacatacaaacttggactctttccgacgttggtttgcttggcacttacaccatgaaactagtcaacaattgagcagacgtcattgggagtcagttgaacggagatacttggacacgttcttttcccatagtggactatatccagacgtcgcgaccatcaagtgtgaacgatgataagtatatagactcgtcgacgtttcattc

SEQ ID NO: 5206 - DNA, 441 bp, Cyanidium caldarium
  Clone ID: LIB190-058-Q1-E1-G10
aattcccggctcgacccacgacgtcagcccacgcgtccgcccacgcgtccgagcccactatgagaatcctctttttcttttgtgaaaagaggagatgtatttgaaaaaagacaagaaatatctgcagcaagaaaagagcaaatttcctggaatggaatatcatggagggtgagaatcccgtttatctcttttctttgtattcaagctgcgttacgatatttcttgttgtggagtcgggttgtttggtagtacagccttaattttgtgggtgttataaatcatccaaggctaaatacgtaaagagaggaaagaggtgtatgatgcaggcaaagaagtgacgcagtagatcagagagtaacacatgcaagtaggtaaagcgaacgggtgagtaaagaggtgtgaaagagtggaagaacatgaaagcacagaagaatgtaagaa

SEQ ID NO: 5207 - DNA, 439 bp, Cyanidium caldarium
  Clone ID: LIB190-058-Q1-E1-G11
aatgcccggctcgacccacgcgtaagagctcctggaggtcatttaggtagattctgtatttggacaaagtcagcttttcagaaattggacgaaatatttggaacttttacacaaccttcgaaacaaaagagcgattatacgcttccaaagtccattttgaccaattgtgatattagccgtataatcaactctgatgaagtacagtctgttttgcgacctaagataataagaagacgcatatctactcgaaagaagaatccactgaagaataagaaggaaatgttcagactcaatccttatagcaaggttcttctgaaagaagcacgggaggctacgagtcaaccttcgcaaaagagaaagaagagattgcttcgaaaaaagaataagcaagtgaagcagattggtcgagagtattacaagaacatagtcgcgtaataaa

SEQ ID NO: 5208 - DNA, 340 bp, Cyanidium caldarium
  Clone ID: LIB190-059-Q1-E1-A3
cgcgtcaggtaaaaaaagatatatcggcaattcagctggttgtgactacaagttataggaatgaagtttccaatcactttacggagaagcagaactgggtaatgaatacaagagtctaggatgacacgcgttttgacaagacaggaccttcatctggggcatgtgaggactcgaatagttccaaatcggctacagaaagtcgccactatttggccaaaccgtcaacttgtagtttgcgctgttgttaacctgaaatccctcttgggtcaacccgttttttaacaaatccacaaggtatactccgataatgaaagcgttttgattaacttgggtcctctcg

SEQ ID NO: 5209 - DNA, 223 bp, Cyanidium caldarium
  Clone ID: LIB190-059-Q1-E1-A8
ggcagatgttgcgcaagaagttggaattaccgctatgccaacttttagttgttatagaacaggaaagaaagtggaagaactcgtgggtgcttccaaggaccggttaaaacatatgattgagaagaacgcttagtgtgtttgtgtgttttgaagcatttgttggagtaaagaatcatatttttgttttcaagtaaagatcatgtaagttctgtttgataattac

SEQ ID NO: 5210 - DNA, 433 bp, Cyanidium caldarium
  Clone ID: LIB190-059-Q1-E1-B10
cgggccgacccacgcgtcaagtgatgctatgactatgccattttgctttgtatttgatacgacttttaagttttcaaaaattccttatcgaaggtcttctaccgacctatgtaaacccaaggtttgactggtttctcttattgtacaacctaaaatttagtttagctatttcagcaccgttcgtctctattgaaacacaatacccaagcggtcttcttcaaggagaccgaaaagacaaagtctacagaacctgttaatgttaccagcgctcccaactcaaactcaaagtcggtcacatttgacggacagttgaataagtctgcttctaatacatctccacgaaccaatatatctctggactctgcaaagtttaaagagtactcctcgaagttcctcaacgatatttctttgcgacccgggttctatggtcaac

SEQ ID NO: 5211 - DNA, 441 bp, Cyanidium caldarium
  unsure at all n locations
  Clone ID: LIB190-059-Q1-E1-B4
ccggtcaggaaatcncggctcgaccacgcgtcagtgaactccatgtcaagttcgccaacctcaccattgttgggaaaagaacgaggagcttcttggaatatgaggacgcaaggttctaatgtcaccggaacctcgaccgatagcagggtaactttagaaagtccaagaaatatttccagggcacaccatcataggcgttcaagtagtcaagctgtaagactacttcgtcaggaaagcacccgggttcgcaataatgtggtggatcgttttcagcgagatttactgccagcagggagacttctaaccgttcttttagttacgagcgagttaacagcggagttattggtacttttatttagctggaagcaaacctgtgatcgtcctttacacttttggatatgtgttttaatttttatacagctattttcacttgttctgaac

SEQ ID NO: 5212 - DNA, 403 bp, Cyanidium caldarium
  Clone ID: LIB190-059-Q1-E1-B7
aattcccggctcgacccacgcgtacgcttcaattgagcgacaaaagattttagaccacatggaacgggtgaaaactcgcttggaattggtttttatagacttcgatcatagtgtacctgttggggaaaggctcaaatgtcttcgaagacttgacgagatatctgttcgagccaagcaatattttaaaggattgcatctgcttatatccgacaaatacgaaatttctaacttgacgggacgcatttctattccttatttctttgaatgcagagaactcgacaaatttctgtgttacaagtaatggttgatcggttgtttggagactccatcatgtgctataactttgcagggttggaacatgtgtatgttgaagtgaaaagtcgaagagttcctcccatagttg

SEQ ID NO: 5213 - DNA, 414 bp, Cyanidium caldarium
  Clone ID: LIB190-059-Q1-E1-C6
aattcccggctcgacccacacgtccgggaagaagtcgccaactttggtgccaagtacgaacgattccttggataacaacttgttggttgacttgggttaaatattagtatttacaagaatggctagtgtttcgggtcttcctcgaagaattataaaggagacggaaaagttacttcaggatccagttcctggaattagtgctgttcctcacgaagacaatgctcgttatttcaatgtgattatccagggtcctgattcttccccttatgaaggaggaacattcaagttggagttatttcttcccgaagactatcccatggctcctcccaaagttcgtttcttgacaaagatatatcatccgaatattgaccgcttgggaagaatctgtttggatatattgaaagataaatggag

SEQ ID NO: 5214 - DNA, 402 bp, Cyanidium caldarium
  Clone ID: LIB190-059-Q1-E1-C7
aattcccggctcgacccacgcgtacggaagaaagaaggaagagaagcggatgttaaagggaagaggaagtagaagatgtgtggaggtattgaggaaggagatgagcataaggaggagaggagtgagtaggataaggttgagggagaggataaggaggggagaggagatagggataagttaagagaagagataaaggaagagaagggataagagaggagagaaggagaggaagggaagtaaaagagggagtaaggaatgtaagtaaggaagaagaaggaagagggagtaggaaggagagagaaggaaagaaaggaagaaggagaagaaagaaggaagagaagcggatgttaaagggaagaggaagtagaagatgtgtggaggtattgacgaaggagatgagca

SEQ ID NO: 5215 - DNA, 434 bp, Cyanidium caldarium
  Clone ID: LIB190-059-Q1-E1-C8
gaattcccggctcgacccacgcgtacgcattccaccaggggagtaaaggcgcaagaaagaaacccaaagcaattgacgggaatcggaaaaaggggtggatcacgtaaattaatccgatataaaccgagaaccttacctctccaagaaggtgttgcacggctgtcgaaagaacgtgctgtgaagtgagagaacgtacgagaaagccaagtgaggaaaagaaggcaagtagagggcggcccgagaaaggagagggcgtaagacgtgatacagagtaggaagaaaagagaagagagctagaaaggaggtaaaagaagagtaaaaggactagaagaggtacggaattcacgaggaaggagcgtgaaggaaggaggaatcccaagtaatcgaggaagaaaaagcttcggtgaaagcgtgaacggattttgtacacactg

SEQ ID NO: 5216 - DNA, 273 bp, Cyanidium caldarium
  Clone ID: LIB190-059-Q1-E1-D10
ttttaaggcaacttgtatacgactttatttaggtacatatttttgaaataaaagcacccgtaattttcatgttgacaagcgagtgacgaaagacaaaggtgtctagctccgttgcaacactgttgatagtactatatatatacatgtgtgtgtgtgtgtgtgtggcggtggtgtcgttcaccaaaagaatccagaagatcattcataaacagtggaaatacttgtaatgggtgatggatatgtttttctagtctttggaaataaatgacatgc

SEQ ID NO: 5217 - DNA, 420 bp, Cyanidium caldarium
  Clone ID: LIB190-059-Q1-E1-D6
gaattcccggctcgacccacacgtacggctgcattcgaggctattcttccgtacatatcttttgaggaagcgcagtctcttcgtgatatcataacgaaccaagcaccttcttttgccttgagtgcagtgatgcaagttgctcaaaaatgtaacaagaccaatggcacccaagataccgattcattacagagtataaagccaagttgctattctagtcattctagtgtaggaaccgccagaaacagttgcaagttgacaagagaccaagagccgtggttgacagatttttccgtatcgcgttcgagcagctcagagattcctctaggttcaccttccacatcgtctctaggttcttcagctagtggagcagtggaacctttggcttccggtagtgcttgggtttctccttttctattgaat

SEQ ID NO: 5218 - DNA, 357 bp, Cyanidium caldarium
  Clone ID: LIB190-059-Q1-E1-D7
agcccacgcgtccggtggcggcattcgacgacgccttcgagctggagcagcgttgagtaatttctgaaacacaaatatgcgtgccaagtggaaaaagaagagaacacgacgcttgaagcgcaagagaagaaagatgagacagcgttccaagtaacggaagaattcctcggacgtctgagttgaatagagttcctaaaacgtggaaaaactctttttgcaactctggcgcagtgagtataccctgctacggaaggttggaagtgtttccgaggattgttcgcaagttatgataaaaggttcttgtggtttttgttttcaaaaaaaagtacatcaacaaaaggaacaagtgaaaaattg

SEQ ID NO: 5219 - DNA, 372 bp, Cyanidium caldarium
  Clone ID: LIB190-059-Q1-E1-E12
cgggccgacccacgcgtcagccaacgcgtccggagaatggacgataaggaactaggcaaaaggatatggtatctgcggtagaacatatgaaagaagcagcaccgactgtttagcaaaaacacagcactctgcagaaaagagaaaatgtaaagtatagagtgtgcggcctgccaaatagtagagaagaaatcgatgaaagtgaaagcgagtaaaagatgaggtatagagaatggcggtcctaacagtaaggatccaaaggtagcgaagtaaatagacgtttgaaaggcgtccagtatgaaaggagaaacgagtgtagcactgtctagtcgtccaactcagcgaaacagcaataactgtgaaaatgcagtaaac

SEQ ID NO: 5220 - DNA, 75 bp, Cyanidium caldarium
  Clone ID: LIB190-059-Q1-E1-E4
ccccaaaaggatcaaaccttacgtacccttgaatgcaacgtcaaaacccttcaaaagtgtcaccaaaattcaatt

SEQ ID NO: 5221 - DNA, 430 bp, Cyanidium caldarium
  Clone ID: LIB190-059-Q1-E1-E7
gaattcccggctcgacccacacgtcagaagaaaaaagagttgtctgaggaccaaacagagtgacaagaagagatggcaaggagaatattgggtgcttatatgggagatgccacagtggcaactctgttcagtatcaaaatgttgttctatcttactatcatgggtttctccataactatcttggctctcatgggaaagaactcggatggtatttggatacatagtgtgccacctgcagaacaatattgtgcatacaagtcttcattggaggtgaaccaccatggaattgcttcctattgcaagtatatcgttgccgtagctgctattgggttggttatctcgtttttccagttttgctacggtctgttgggtatctttttcaagtggcaacaaaagttgtggtatattgaagatgctttcaatctatttt

SEQ ID NO: 5222 - DNA, 423 bp, Cyanidium caldarium
  Clone ID: LIB190-059-Q1-E1-E8
ccggctcgacccaagcgtacgggtttttgtttgggataaactgccaaaaaagaattacacaagacgtaaagaatggacaaggcaaacaactataaacccaagtttcctcctatcaaagaaagaaacagaatagcgacggaccaaccagaaatacgcaggattccggtaccggccaatagatatactccgttaaaacagtcttggttacaaatatatgagcctttggtaaagcacctgaaattgcaagtacgaatgaatttaaagtcaagaatggttgagctcaagaatggtcctgaaacagatgactatggcgctctccagaaaggtgaagagtttgtacgagcgttcctcgtaggttttcaagtttctgatgccttggctttgattcggttggacgacttgtttgtggacagttttgacatt

SEQ ID NO: 5223 - DNA, 375 bp, Cyanidium caldarium
  Clone ID: LIB190-059-Q1-E1-F10
cgggccgacccacgcgtcaggaaagaagagagtgtaaggcggcgtcataatagaaatccgaaaggagtagaagaaaagagagagaagaaagaaaagaagagaaaagccgtactgaagaccgacacaggtactcgaggagaaaggagacccaaattaaggtgagagaatggacgataaggaactaggcaaaaggatatggtatctgcggtagaacatatgaaagaagcagcaccgactgtttagcaaaaacacagcactctgcagaaaagagaaaatgtaaagtatagagtgtgcggcctgccaaatagtagagaagaaatcgatgaaagtgaaagcgagtaaaagatgaggtatagagaatggcggtcctaactg

SEQ ID NO: 5224 - DNA, 425 bp, Cyanidium caldarium
  unsure at all n locations
  Clone ID: LIB190-059-Q1-E1-F11
acccacgcgtcaggaaaaggaaagaaagcgaaaaaatagcgaataaatctagagtagaaagctgtaagaagaagagtaggatcggcagagaacgtacgagaaagccaagtgaggaaaagaaggcaagtagagggcggcccgagaaaggagagggcgtaagacgtgatacagagtaggaagaaaagagaagagagctagaaaggaggtaaaagaagagtaaaaggactagaagaggtacggaattcacgaggaaggagcgtgaaggaaggaggaatcccaagtaatcgaggaagaaaaagcttcggtgaaagcgtgaacggattttgtacacactgcccgtcaagttctggaaatgtgccaaggattaagcaagaaaattagannagagtaggaaaagaagaaaggaagtgaagacgtaagacgtg

SEQ ID NO: 5225 - DNA, 352 bp, Cyanidium caldarium
  Clone ID: LIB190-059-Q1-E1-F12
gattaaataaacttttgaaaggcgtccattatgaaaggagaaacgagtgtagcactgtctagtcgtccaactcagcgaaacagcaataactgtgaaaatgcagtaaactagcagtaggacggaaagaccccataattcttgactagataggtttagggaggagagagaatcatgaagtagaggaggtggggtaagagatgaaagaccactgcatgaggataaggaatctaactgagtaaggaaaataagcttaagctagtttggctggggaagtaaagcctaagaaagagtaaattaggcaagcaaaggcatgagagaagtataatagcagaagcatgcttgaagaaaaaga

SEQ ID NO: 5226 - DNA, 181 bp, Cyanidium caldarium
  Clone ID: LIB190-059-Q1-E1-F4
cccttgggaaaaaataaaaaaacaaaaaaaaaaaacaaaaaaaaaaaaaaaaaataataaaaagaaaaaaaaaagaacggaaacacagccaactaggtcttcccggtgggaggatcaaagcgttggttcccactgatcccattccatgaccctcctataagacaccggatttcctattcaa

SEQ ID NO: 5227 - DNA, 430 bp, Cyanidium caldarium
  Clone ID: LIB190-059-Q1-E1-F6
aattcccggctcgacccacgcgtacgggtcgtgcagcttgtgcaggttttggtggattggaacatgtgtatactcccacgttgattcaaggcgacttgagtagagaaaaggtcatatctgtttcttgtggacgcagtcatacagcagctgtcaccgagagtggacaagtatggacttggggatatggatacgaaggtgaacttggacacggagaaaagtcaagtcagttgcaaccgaaacgagtagagtctttgaacaaagtggtcgatgttgcttgtggaagagactttacaatttttgtgtgtgaggacggtttatattcctgtggagctgatgactatggacaactcggtttaggtcggtcgcatggagagaggtttgtacaaactccaagatcactttcaggaactggcctatcggaaattgttgc

SEQ ID NO: 5228 - DNA, 338 bp, Cyanidium caldarium
  Clone ID: LIB190-059-Q1-E1-G4
cgcgtaagataaaaaaaaaaaaaaaaaagaaaaaaaaaaataaaaaaaaagggcagacgcactaaatgataaaaagcttacttacgcgtgtaagagaaagtcgtaggtcttctatagggttgggtaaggtcatttcactggacatagttttagaaattcttcattgggaaaaccttgcagttacttaacttagtcgccttgtggcagatcaacttttcgccagcaggagtcaaatctaattggtcttcatctgtcgaccttcactagagttgagccacttgcattggaaatgggattcgcattgtagccattcagtatgctcggcgggtgatggtgat

SEQ ID NO: 5229 - DNA, 162 bp, Cyanidium caldarium
  Clone ID: LIB190-059-Q1-E1-G5
cgacccacgacgtcagggatgaaattgctcattcaaaaaaaaaaaaaaaaaaaaaaaaaaaaaaaaaaaaaaaaaaaggaagacgaacaaaaggataaaaaacttaaataaacttgcaagcgaaagtcataactcttctaaagtgatcatctaaattcaatt

SEQ ID NO: 5230 - DNA, 437 bp, Cyanidium caldarium
  Clone ID: LIB190-059-Q1-E1-H5
aattcccgcctcgacccacgacgtcagcccacgcgtccgcccacgcgtccgcccacgcgtccgcccacgcgtccgcccaaattaaggtgagagaatggacgataaggaactaggcaaaaggatatggtatctgcggtagaacatatgaaagaagcagcaccgactgtttagcaaaaacacagcactctgcagaaaagagaaaatgtaaagtatagagtgtgcggcctgccaaatagtagagaagaaatcgatgaaagtgaaagcgagtaaaagatgaggtatagagaatggcggtcctaactgtaaggatccaaaggtagcgaagtaaatagacgtttgaaaggcgtccagtatgaaaggagaaacgagtgtagcactgtctagtcgtccaactcagcgaaacagcaataactgtgaaaatgcagtaaactagcagt

SEQ ID NO: 5231 - DNA, 431 bp, Cyanidium caldarium
  unsure at all n locations
  Clone ID: LIB190-059-Q1-E1-H6
aattcccggctcgacccacgcgtacgcggacgcgtgggcggacgcgtgggcggacgcgtgggtggaatcaaacgctgaccaaagagcgttggttgattattggtgcagctattttaggaggtttcgtttccagaactttatttgcaactcatgacaattcacagccacgccaaggagacaaggcgcttccaaacaggcgaaaacaaagcaaccgtagaagcaaaactactggaaatgctacagagcaaaagagtcctttttggtggccatttaagttttaatattgttattctagttttgtcgacgaagttccgtaattacggaggcaagagcgtangggtcgaagccttgttctaacaactctatcgccacttgtacagtttctctgtctagtcacgtttccaaaagtctcgctatttcgtaggaaacta

SEQ ID NO: 5232 - DNA, 352 bp, Cyanidium caldarium
  unsure at all n locations
  Clone ID: LIB190-059-Q1-E1-H7
agggtgtgtgcatagatattctctcccatggcaaagtatttaccggatatgaagagacttatggatagaaaggtttctgttcagttaaatggaaaccgcaaggtggaaggcgttctccgtggttatgaccagtttatgaacattgtgttggaagattgtgtggaaaaactaggacctatgaatgataaggaaattggcacagttgttgtacgagggaatagcgttttcatccttgaagtccttgaacgagccacgtgacctcgtctctctctctctctctcttgctttctcggttagaaaaccaaaaataatacatctacactgttttattagaaaacaaatnnnanaataa

SEQ ID NO: 5233 - DNA, 436 bp, Cyanidium caldarium
  Clone ID: LIB190-059-Q1-E1-H8
aattcccggctcgacccacacgtccgcccacgcgtccgctcaaaacagacaaaagtttgcggacctacttagatactattcgaccaagtcaccagatgaaatgatttcattgaaggagtacgtcagccgaatgaaagaaggtcaagactccatctattatattacgggtgaaagcaaacaagcggttgagaattcgcccttcttagaaaagcttcgacgcaaaggatatgaagttctcttcatggtggagccgattgatgagtactgcatccaacaactcaaggaatacgatggaaagaagctggtttgcgctacaaaggaaggtctgaaattggacgaaacagaggaagagaagaaagagaaggaggaacaaaagaagtctttcgaacagttgtgcactgttattaaggaaattcttggagacaaagtggagaag

SEQ ID NO: 5234 - DNA, 418 bp, Cyanidium caldarium
  Clone ID: LIB190-060-Q1-E1-A12
ttcccggctcgacccacgcgtacggaaggatgcccgtatatatgcatgttgggccaacgtagaactggaattgaacaatatggatagagcagttgaacttttacaacaggcactgaagataaacaatttggactcgtatctatggctacaatatgcagtggttgaacatagacgtggcaatgttccaagggcgcgtgctctgtttaagcgaggtgcagatatcaatccctttgattggtttctgtgggaggaatggagtcatatggaagcgaaggaaggaaaccaaaaggaagcagaacaacttgcaaaaaagagtgtcaaagcaaaattacgaagtatgggaaataatttgtcaagatacgatcgtgagcattcttttcaaccaagttatgtgtcataagaaaggcagcatgaagac

SEQ ID NO: 5235 - DNA, 431 bp, Cyanidium caldarium
  Clone ID: LIB190-060-Q1-E1-A2
tgacggtcaggaattaacgggtcgacgcacgcgtcaggaattatggtgtggttaggtggttacgcttaatgttgccatcaatagtcataacaatgctcttctaacccttttggtttccaatcaatttgtagaagtaaagggatcggtaggttgtagtattttccttttatacgacagtttatgtgggaatatttaggtatttaaagcaataagattggaaaatctatttcaaatatcatgtgcggattccgtggagcggtttcaattgtgtgtttttctttctatgacatgttttcagagtcaagggaaaagcattatgctatttatatggctcatcatgtggtttgcggaaaccttgattgattggattaagcatgcctttgtgaccaagtttaacggcatatcctacaaagtatatcaacagttttcct

SEQ ID NO: 5236 - DNA, 360 bp, Cyanidium caldarium
  unsure at all n locations
  Clone ID: LIB190-060-Q1-E1-A5
agaactttggctgcgtctggtgcaacgtcaatttactcgttgcttcagagtaaaacagactatacttttacagtgcaaagcatagagctggctaatctaacagacgtatacaacagcagtgtattgggctttacctttcttgcttccaatgacactgcttggaaacaatcaagagccaatgtcactggtgcacttagtgcagcaaaacaaaacgtaacaagagcaatagcgtttctagaacgcttgatagcagcaagcacagtgaataaaacggtggagtttagtaagctctctagtggtacgaacgaggttgtttcgctggcaggtttaccgcttaatttcacganaaattctactgga

SEQ ID NO: 5237 - DNA, 393 bp, Cyanidium caldarium
  unsure at all n locations
  Clone ID: LIB190-060-Q1-E1-B1
caggaattcacgggtcgacgcacgcgtccgcggacgagtggggccgtgggaagacgcttcgtttcctccaagggatcgatgtttctatcctctttgtactgagtattgtatacagatatcatagtgtgtgaaatacttgtgttccatgtcgtcctctatgaaatccaacttgtatgctctactaccagacgacgcagaagatgccacggaaggagtcgtcagcagaacaacatcgacgagtgttgaaaagcccaaagcatcttctgcttcctctgtggcgtcctccaccaaaacaaacaaagtaaaaataccgcatgtagacgctttgccagtagcagaagaagaggatacaactttggcggaagaagagaaanaggaaaacactctccgcac

SEQ ID NO: 5238 - DNA, 429 bp, Cyanidium caldarium
  Clone ID: LIB190-060-Q1-E1-B12
accggttaggtattcccggctcgacccacgcgtacgggatttgtcgccccgttgccgtcgcctacttgtgcttgtgaaggtacccagtgatgtccgagttgttatggcatctcgtgaaaggccacaacgcattccaaataagaagaaaaggagtcacgctttcaacagagaaaggaaatttaaagggtgtcagtacttttaaatattcgggtcttgctcaaccgaaggccgtcgacattgctccagctacagaaacttttggtattttgtactcgaagaaacgtaccaagaaagatgctgctcgaaaaccttcgagggaatttcatactgatgtcgtgaaaaaaggcttcctcggctgtgcaaaagtcgtttcgaaggatcttgcaaactatcgaccggacttgaagaagcttgccattgcaagaatat

SEQ ID NO: 5239 - DNA, 422 bp, Cyanidium caldarium
  Clone ID: LIB190-060-Q1-E1-C10
tcccgggtggccccacgcgtcagcagacgcgtggggtatgatgcaggcaaagaagtgacgcagtagatcagagagtaacacagcagcggtaaaacgtgtgtagcaagcgtagagcagaagaactgggtgtaaaggtcgagtagtagagtaagtgtaaaagggaaaggaaaggagagaaagaggaaagggatgaaatgcagagatctctagagaaaggcaagaaagaaaagaaaggaagacacagtaaatgaggcgagaaagcataggaagtgaaacggattaagaacccgtgtagtctatgcagtaaaagaaagaatgagtaagaaaaaagggagtcattccaccaggggagtaaaggcgcaagaaagaaacccaaagcaattgacgggaatcggaaaaaggggtggatcacgtaaattaat

SEQ ID NO: 5240 - DNA, 388 bp, Cyanidium caldarium
  Clone ID: LIB190-060-Q1-E1-C2
cggtcaggaattaccgggtcgagccacgcgtccgcccacgcgtccgcccacgcgtccgcccacgcgtccggaacccgtgtagtctatgcagtaaaagaaagaatgagtaagaaaaaagggagtcattccaccaggggagtaaaggcgcaagaaagaaacccaaagcaattgacgggaatcggaaaaaggggtggatcacgtaaattaatccgatttaaaccgagaaccttacctctccaagaaggtgttgcacggctgtcgaaagaacgtgctgtgaagtgagagaacgtacgagaaagccaagtgaggaaaagaaggcaagtagagggcggcccgagaaaggagagggcgtaagacgtgatacagagtaggaagaaaagagaagaga

SEQ ID NO: 5241 - DNA, 362 bp, Cyanidium caldarium
  unsure at all n locations
  Clone ID: LIB190-060-Q1-E1-C3
cgggtcgagccacgcgtcagcggacacgtgggttgtgacgaggctgttcgctggaatctgtggccccttgtcgtactcttgaacactttgtttggctctcttttgttagtaactgttttgttttctttaatttgaagagcttgggagtataactggagtggtttgtggggctacttatgtactgagcccgttgggttttctgttctcgaaatttgcgcccatgcgggagttgctcaacgacagaagagttacatgggagaatacggacggtgatatagatgtatttgtggagactgggtatgtgacagaggaagaagaggctgacgttgttgcgtcngancgtggggtagagagtgatgttg

SEQ ID NO: 5242 - DNA, 426 bp, Cyanidium caldarium
  Clone ID: LIB190-060-Q1-E1-C4
tgacggtcaggaataacgggtcgacgcacgcgtcagctaaaaaaagctttgttcgcaagtctcgttgcttgaacagttctcctcctcctccttcttgttgttgtcaaaacaagttgtccaataaaacgtgttgtgatagacgcaagtttttgaatgatttggtatggacaacgaaaagtgtggtggtaacaagtgcgagttattttctcctgggtaatactactgcttgggcagcgaaagaagaaaaacaaagtgtccctgcagcagttgccaatcaagtggagacatacaaagacttggtaaaaggttataaaatattgcggccgataggttggaatcaatttgctggacaacgaaaccaatatgatatcaagtggcaagatatcattcagcctttgggaatagtgatgattgctactgtggatg

SEQ ID NO: 5243 - DNA, 256 bp, Cyanidium caldarium
  Clone ID: LIB190-060-Q1-E1-C5
agcccacgcgtccgcccacgcgtccgagacgcccaaacaaggacgtcctacttgcggacctgaggaaggtgtcggagtcttctccaacgcttcggactttggtacgagcaaaataaagtgtgtggaatattggggtcgtccaggtcgcatgttccaagagtagaacgtgcgttttgtgtttgttttgtgggtgaacaacatttgttcttgtctgaaataaaataacagctatgctacaaaaaaaaaaaagaagaag

SEQ ID NO: 5244 - DNA, 427 bp, Cyanidium caldarium
  Clone ID: LIB190-060-Q1-E1-C9
cggtcaggcattcccgggtgcccccacgcgtccgtgaaagagcagcatgagggacctatttatacagttgattggtctcatcaaagtggccttatcgttactggaggtggtgacgacgcaatacaaatctatcaagaacagccttttggaaagactgaaacacttgaaagcacaaaagaacaattgcttccgtctcgagatatagcgtgtagtgattcagaagattccagccgttccgaaccttttaccttggtagctactatcctcaacgcacatgaaggtgaggttaattgtgtgaaatggaatccacaggatggttacgtcttcgcttcttgtggcgatgacggtgtaataaatatttggcagataagtataaactaattctgactttcggacaagacgcgttgttcactagccgttgtcgttg

SEQ ID NO: 5245 - DNA, 386 bp, Cyanidium caldarium
  unsure at all n locations
  Clone ID: LIB190-060-Q1-E1-D1
tcaggaattaacgggtcgaggcacgcgtccggaatcagggtaagaggtagaggagcaagaagagaagagagaatgctgggtggagtagcgaaacaagagaagggaagtaaaaggtaagaaagaggaaaggtttacgagagaaggaagtagaaagaagagagtgtaaggcggcgtcataatagaaatccgaaaggagtagaagaaaagagagagaagaaagaaaagaagagaaaagccgtactgaagaccgacacaggtactcgaggagaaaggagacccaaattaaggtgagagaatggacgataaggaactaggcaaaaggatatggtatctgcggtagaacatatgaaagaagcagcaccgactgtttagcanaaacacagcac

SEQ ID NO: 5246 - DNA, 416 bp, Cyanidium caldarium
  Clone ID: LIB190-060-Q1-E1-D10
ttcccgggtcgccccacgcgtcagaaggaatcgtccgaggaaacaacgcagcagacacaagagatttctttcgagagtatattccaagaacctgaaaattttagagaacaagttcctattttcagatacacgagctattctagtccaaaccgaggttttcgtttccacaacatcagactggttggaaaacatccactatggggtcactatctttggaatggagcagttttacttgcagacattctttcaggagaagctcccattcctactcatatacaagtagttggtgatcgaatattagaacttggagctggagcagcagtgcctagtatgattgcagcgttgcgtggagcaagttatgtgttgatcaccgattatcctgacaaggaactcgtggaaaacataaagtataatat

SEQ ID NO: 5247 - DNA, 362 bp, Cyanidium caldarium
  unsure at all n locations
  Clone ID: LIB190-060-Q1-E1-D3
gggtcgagncacgcgtcagtaccatttcatcatgaaatggcacagtctccaaaatatccaaagaaattattcttttattgtgatgtggaacctccacgtggaggggaaacgccaattttattatctcatctcgtatatcaagaaatgaagcaacgatgtcccgactttgttgcagcattggaacaaaagggcatcaaatatacgagaattatgccagaagaggatgatccttccactcccattggaagaggatggcgatcgacgtatgcggtgaacagtcgtgaagagttggagaagcgttgtcatgaacttggttccgaattggagtggcttgaggatggttgtttaaaggttactacaat

SEQ ID NO: 5248 - DNA, 340 bp, Cyanidium caldarium
  Clone ID: LIB190-060-Q1-E1-D5
agattggaaagaaaattgcaggaactggaatccaaaagtataggtagcagcagctccgagaatatcatcgtcattactggaagtggacatcataccaaaggaaagaaaacgccagctcgtttgtatcccgcagtcgaacagttcttgttgtcccatcgttactcgttccaagtagtgaaagataccaacaagtatgccggagcatttctggtccgtcttggcggctagttttatttgatatatctctccaaaaacttgcgatgaaactcgttgcgaacggtatcgttgataaacccttgttcattttcaaaagaaaaaaaaagaattgaagaagaaggaa

SEQ ID NO: 5249 - DNA, 428 bp, Cyanidium caldarium
  Clone ID: LIB190-060-Q1-E1-E3
cacgcgtgcagtgcggtcaggaattaccgggtcgagccacgcgtcagcccaagcgtccgcggacgcgtgggtacgacagcaattttcagtttatcaaagctcgagtagaggatgggtctattggagaattgcgcttgtttcatattcattccagagatcctttgcctcctccagccgaatatttggccactagtggtggaatatttctagatatgacaagtcatgactttgatatggcaaggtttatcagtgggagtgaaattgaacaagtgtttgtgagtggaagagcatttgatgaggaagcgaaacaagcaaacgatttggatactgtgatgattcacttacgaatgagaaatggaagtatgggcactattgataatagtcgtcgttgtagttatggatatgatcaacgaatagaagtttttggg

SEQ ID NO: 5250 - DNA, 415 bp, Cyanidium caldarium
  Clone ID: LIB190-060-Q1-E1-E4
ggtcaggaataacgggtcgagccacgcgtcagggttccacagacatgtcgaacgacaatcagtctgataagagcactttgaaagaagcggaggagaagctgcagagtgcagttcatactggaacagagaaagtttctcaggtgttgagcgacgtcaaggaaactgtgacggagaaatacaaggaatggacagcaccaaaaagtagccaagaagaagcaaaagaaaaagcacaagaagcgaaagaagaggctaataaagcttttaatgctatgaaagaaagtgcgagtgccgcttcagaggctgcatcagagaaagcagaaaaaattaagcaggagttgaaggagtgaagatacacagtagttttctcctatagtgttcttagtagtatttgtagtgatatttgtctcgtgatgaa

SEQ ID NO: 5251 - DNA, 309 bp, Cyanidium caldarium
  Clone ID: LIB190-060-Q1-E1-F1
cggtcaggaattaccgggtcgagccacgcgtcagcccacacgtccgcccacgcgtccgcacgggcaatgtctcccaaatgaggttttaccgatgggcgactattgctaattgaaaactactccaattcacgcgcgttcacctctcgtaggtgaccgtgcaatttttgaaaccttctaaaaaaaaaaaaaaaaaaaaaaaaaaaaaaaaaaaaaaaaaaaaaaaaaaaaaaaaaaaaaaaaaaaaaaaaaaaaaaaagaaaaaaaaaaacaaaaaaaaaacggagaaaaacaaaggggggcgccacaaaa

SEQ ID NO: 5252 - DNA, 212 bp, Cyanidium caldarium
  Clone ID: LIB190-060-Q1-E1-F12
cccacgcgtacgaactgattgacgatataaaaggaagaacggaccgagttttacaagtcgatattgctggagtattcttcccggccgtttttcaaggattttgaagaatcctggcctttttgcggtcaatatgttaattccaatagagcaattgaggaacggaagtacctaatttttcaatgcggtagtaattccttggttcgtaactaatg

SEQ ID NO: 5253 - DNA, 425 bp, Cyanidium caldarium
  Clone ID: LIB190-060-Q1-E1-F3
ggtcaggaataacgggtcgacgcacgcgtcaggaaatgctgctgctgtctgacgagaagaatggcagttgtacgataacttgcgtgtttctcgaaagtcgatttgtattatggagcgttattcaaaagaacagtgtttgtgtgtccactactttaaataatagaaactggagaatgcaaaataacaacgaaaataactcacctaaaagatatccttttgaagacgattggagagaaaagttgaatagaaagatgaaacaggaaaaaatagctcgacaagttatgtctcaagtgcaagagttgagatggaaagaaagtttggaggggtacattgagaacgaagtggaacatattcgaaaccacgtcagtaataattttcgttatcatcagccacaaattatgaacaaaggtgttgaaactgcaaaa

SEQ ID NO: 5254 - DNA, 398 bp, Cyanidium caldarium
  unsure at all n locations
  Clone ID: LIB190-060-Q1-E1-G10
acgcgtacgcacacgcgtccggattgttgggccttctggtggtgatgccctggattgagctacgtagtggcaactccgctgtcttgaaagacataactgcaagtattgaaaagcctgacataggatggataactaggacgaatctcagtacttgtctgaattctgcagaaggaaatgttacggttgacttgtcgcggcagtgtancttgaaggatatattttccttgaagcttctcgacaataactttaatttggcgtgttttaatgatgccttgtttttagttttaccaggcttaccctttgttattactggaaatcgtaaattctgtagacgctcggacttgaatgaaacggaaacattggagtcctgcttttcgtttatgaagatatgccccacg

SEQ ID NO: 5255 - DNA, 323 bp, Cyanidium caldarium
  Clone ID: LIB190-060-Q1-E1-G11
tccggctcgacccacgcgtacggttttattagtagcaaaagtagcttttgcagtacaagataatgtcaatcccttgaatttgttgaaccaaggtttccgctcccaggatttggctttggccacaatattacacctgccatgtacatttgtgggataaaacccaaatggcccggtggtgtacaagataaacccctgtctccgtaacctgctgggtacaagttgcgactttttttgacgataccctgtacaattttgggttttaatttaaagaacaacaaccaacctcgttacattttatgggtaattgttttgaatatattata

SEQ ID NO: 5256 - DNA, 418 bp, Cyanidium caldarium
  Clone ID: LIB190-060-Q1-E1-G12
cggttaggaaattccggctcgacccacgcgtacgcagacgcgtgggtcgtttgacgttggtgcctcattaagccatcgttgaactacatcttttatctcttgtagcacaaacacaaattaaagaacaatgcgtgaggttatttctcgagatattggtcaagcaggtgttcaagtagcaaactcttgctgggaactttattgtttagagcatggtgtcaacgctgatggaaccattgataaaaagggaaacacagcaaacgaagaagcttttggtaccttctttacccagacaagctcgggacgatatgttcctcgttgtgtatttgtcgacttggaaccttctgtcgtagatgaagttcgtaccggtgcctaccgccatctctatcatccagaacaacttatttcggcaaagaagatg

SEQ ID NO: 5257 - DNA, 373 bp, Cyanidium caldarium
  Clone ID: LIB190-060-Q1-E1-G2
cgggtcgagccacgcgtccggtgaaagcgagtaaaagatgaggtatagagaatggcggtcctaacagtaaggatccaaaggtagcgaagtaaatagacgtttgaaaggcgtccagtatgaaaggagaaacgagtgtagcactgtcgagtcgtccaactcagcgaaacagcaataactgtgaaaatgcagtaaactagcagtaggacggaaagaccccataattcttgactagataggtttagggaggagagagaatcatgaagtagaggaggtggggtaagagatgaaagaccactgcatgaggataaggaatctaactgagtaaggaaaataagcttaagctagtttggctggggaagtaaagctaagaaag

SEQ ID NO: 5258 - DNA, 363 bp, Cyanidium caldarium
  Clone ID: LIB190-060-Q1-E1-G3
ggtcaggaataccgggtcgacgcacgcgtccgggccatacccccgttgaatcgctataggaaagtgagcaatacagtcttcaaggcaacagctttaacgttgtcgactgctgcagtaattggaaacctatacatattcgcaaacttgctcagcatagtttcctacagaagttcaaagaaggagctgacggaagccagtaatgctcaggaaaactgagaaacacaagttgtcttcacgtctggaggatggaaatattatctgaagctaggctgggggtctgttccttgtagaagctctggtgttttgagaacttgcaattgttttgttctttgtagtaaagaaattgtcttcttttttcttaag

SEQ ID NO: 5259 - DNA, 362 bp, Cyanidium caldarium
  Clone ID: LIB190-060-Q1-E1-G4
cgggtcgacgcacgcgtccgaattcatcacgggaaaacatttcttctgtgcgtcgaagctatcatgaagtaagctttttcgattgggcagcagatgacgaaagtcatcaaacctcggaagcaacctaccagttggcttttgaacccaattcaggaatgcctaagcgctctccagttacgattgacaagactagaccgaaagatgatactaagagtttgttgaaaagacaagatgatgtatccgaggagcgaagtatggaacaaggaggagcaggtaagctacgtgggtcgagaaatcggtattcatcgagatacggctctacagaaggagagcgacatagaccaaacggtagacagccattt

SEQ ID NO: 5260 - DNA, 326 bp, Cyanidium caldarium
  Clone ID: LIB190-060-Q1-E1-G6
agcccacgcgtccgcccacgcgtccgcccacgcgtccggtatgaagtttgcaagacgttccgtaaccgatgcggatgtgcgtcgctatgagatgtacgcgcaaaacatcgaagctacgagaggattcggtggtggattcaagttttccgatacaccttcctccaacaatcaaggtaacaccggtgacgaggatctctattcgtaagagaacggttcaggaatctgtgctttattgatgtgtggctttttgttgaaataaaaatttgtttagtttaaaaaaaaataaattcaaaaaaaaaaaaaataaataaaatactacaacactt

SEQ ID NO: 5261 - DNA, 427 bp, Cyanidium caldarium
  Clone ID: LIB190-060-Q1-E1-G9
ccggttaggaattcccgggtcgacccacgcgtacgcccacgcgtccgcggacgcgtgggccagaatggaccaacgacgaaatattagaaagagcaaaacaagtacaaaaacttggtatcgaaagaggtctccaatatcgttgtgtagccagcggtgagtttttaagaataggactccttcaaaacccatttcgtgcagatattatgcagaagaaacctttgaaagaacagagaattgtcgaaattggttgtggttttggtatcgatgtgcgttacttgattcggcaactgggtgtttccaaggatcatgtcgtagctatcgatgtagctccagcctttattgagttgggatacgaactatttcaagacaaggaagcagtggaatcttgtttccatgtaaagagtgttggggatgaggatttcgtgag

SEQ ID NO: 5262 - DNA, 428 bp, Cyanidium caldarium
  Clone ID: LIB190-060-Q1-E1-H11
accggttaggtattcccggctcgacccacgcgtacgaagactgctctgagttgcctctttctctctttccttatcgctgccgcagttgcagccgacgtagtttcagaggagagatggggatatgctcagcaaacccaacaacagcaacagtgccaacaagtatgtaaacagtatgcatactatcagagtccagtctgcacttccgtaaccacacagagcccatactggacccaatgctcgaagactgtgcaaacctttgtcccaagccagtgcagtacttatacccaatctcctacatggacctattgcagcacctacaccaccactagcgtaccatctcaatgcagcaaggccgtgactacttatactcaaacctgctgtgcttatgcccaacaaacttcctatgcagtcagtaccgagcaatatgt

SEQ ID NO: 5263 - DNA, 410 bp, Cyanidium caldarium
  Clone ID: LIB190-060-Q1-E1-H2
gggttacgggtcgacgcacgcgtcagcccacacgtccggttgggccttctggtggtgatgccctggattgagctacgtagtggcaactccgctgtcttgaaagacataactgcaagtattgaaaagcctgacataaaatggataactaggacgaatctcagtacttgtctgaattctgcagaaggaaatgttacggttgacttgtcgcggcagtgtagcttgaaggatatattttcattgaagcttctcgacaataactttaagttggcgtgttttaatgatgccttgtttttagttttaccaggcttatcctttgttattactggtaatcgtatattctgtagacgctcggacttgaatgaaacggaagcattggagtcctgcttttcgtttatgaagatatgcccacg

SEQ ID NO: 5264 - DNA, 381 bp, Cyanidium caldarium
  Clone ID: LIB190-061-Q1-E1-A11
cgacccacacgtacgaaatattttatgccgctagtcgacagaagagtgttgtgggagtggacgagtgcctattcaataactatttattattcgccttatcaagggcctttggaaaatagcgaacgggtatatattcacgtgggaaaagatggttggaaacatgttttgggaacatttttgatgaacaagtgggatactttcttcgaatatcaagtctcggacgtgctctactgtactcaactagactttgtatttaccgatggaaaccaaatatgggataacaaccaaaatagagattggcatattgtatggagagagcaaagagtcctcaagtatttcgactgctgttcaaaccatccatcgaacacttttggcaatgag

SEQ ID NO: 5265 - DNA, 303 bp, Cyanidium caldarium
  Clone ID: LIB190-061-Q1-E1-A12
aattcccggctcgacccacgcgtacgaagtttggttgttttcttggtagcagttgtacattcaacatcatcaaatgccaaagggaggaaagaaagattcttcaaagaaagaagccacaagtaaacctgcagcagcagatgctacaaagacgacagaaaagtctggtccggaagccaagttgaagggaactggtgcaaagaaacaataaaaagttgactatgcatgttcctgttatgttttgtgagttctgtttgatagtttccagctattcttttggtagtgaataaagagaaaattttttat

SEQ ID NO: 5266 - DNA, 455 bp, Cyanidium caldarium
  Clone ID: LIB190-061-Q1-E1-A4
gtaccggctacgaattcccagctcgacccacgcgtacggatttctacgtgggtttgcgtctcaacatgtctttttttgaaacgtatacagtcgaccctgctttccaacagaaactcagtaacaaagacaagtaaggccaattgggacatgagagcacggtcgagtttaccgctgggaccctgaaaagggagaagaacctaaattggttacctactcgattcctctcaaagaatgcggtcccatggtgttggatgccttattcaaaatagagaatgaagtggactctacttttgtatttagaaggtcgtgccgagagggaatttgtggaagttgtgcgatgaatatagatggaaagaatcgtctggcttgtttaactccgttagcacgacccaaagcagacagttactgtatatcctttaccttatatgtatgttatcaaagatttggctgtggat

SEQ ID NO: 5267 - DNA, 388 bp, Cyanidium caldarium
  Clone ID: LIB190-061-Q1-E1-A8
ttttcctcacttggctttctcgtacgttctctcacttcacagcacgttctttcgacagccgtgcaacaccttcttggagaggtggggttctcggtttatcctcgagtacctgtgtcggtcttcagtacggcttttctcttcttttctttcttctctctcttttcttctactcctttcggatttctattatgacgccgccttagactctcttctttctacttccttctctcgtaaacctttcctctttcttaccttttacttcccttctcttgtttcgctactccacccagcattctctcttctcttcttgctcctctacctcttaccctgattccgttcctcttcctaaccttttcctcttctttttcggatttcttttctttcatgc

SEQ ID NO: 5268 - DNA, 415 bp, Cyanidium caldarium
  Clone ID: LIB190-061-Q1-E1-B10
aattcccggctcgacccacgcgtacgatcatccaaacggatgccgctatcaaccctggcaactcaggaggaccgctattggattctcgaggaagactgattggcgtcaattgtgcaatagcttcaccttcaggagcgtttgctggtataggttttgctattcctgtggataccgtgaagaaagtagtggaacaaattatgcagtttggtcgagccattcgaccttcgttgggaatcttttttgccccggaacaacttggaagaaggttgggtttggagaaaggtcttttgattctttatttgcgacccaatgggcctgcagagaaagctggtttattggcaaggaagagagaaaaaggttcaggacgattgatcctgggagatatcgtcattggtatagagaagcagccagtgaa

SEQ ID NO: 5269 - DNA, 420 bp, Cyanidium caldarium
  Clone ID: LIB190-061-Q1-E1-B11
aattcccggctcgacccacgcgtacgcccacgcgtccgagaagcgttggctgttgcataaagagctatgtcggaagagtcagacaacgaaggcgtggagatcaagttagagactgcacctcatgatcctcgcttccggactactaatcaagccaagcactgttggtcgagatacatcgagtatcacgcttgtgtgaaacaaaaaggtgaagaggacagcgagtgtcaaaagtttaagcgatggtacaagtcactgtgtcctatggaatgggtagaaaactgggacgaacagcgtgccaacggtacctttcctggtcccgtgtagttgtactgttccacgtgggcccttttggagtttaactgacctgttgtcggtattgtccgtatggctttttttgttcaataaagttttatgtggtag

SEQ ID NO: 5270 - DNA, 251 bp, Cyanidium caldarium
  Clone ID: LIB190-061-Q1-E1-B12
aattcccggctcgacccacgcgtacgcggacgcgtgggcaagcgtagagcagaagaactgggtgtaaaggtcgagtagtagagtaagtgtaaaagggaaaggaaaggagagaaagaggaaagggatgaaatgcagagatctctagagaaaggcaagaaagaaaagaaaggaagacacagtaaatgaggcgagaaagcatacgaagtgaaacggattaggaacccgtgtagtctatgcagtaaaagaaaaat

SEQ ID NO: 5271 - DNA, 264 bp, Cyanidium caldarium
  Clone ID: LIB190-061-Q1-E1-B5
caacccacgcgtacgaacatcatcaaatgccaaagggaggaaagaaagattcttcaaagaaagaagccacaagtaaacctgcagcagcagatgctacaaagacgacagaaaagtctgggggggaagccaagttgaagggaactggtgcaaagaaacaataaaaagttgactatgcatgtgcagtcctgttatgttttgtgagttctgtttgatagtttccagctattcttttggtagtgaataaagagaaaattttttatattt

SEQ ID NO: 5272 - DNA, 255 bp, Cyanidium caldarium
  Clone ID: LIB190-061-Q1-E1-B6
attcccgtctcgaaccacgcgtacggtatgacgcattcattggatagcaaacaattacttgtacgttgtagcgacagtcatcgaaagcgacactttggaaataatggaaagttgtgtctatggcacacgcagaacgggacatcttccacaatgttgcctagtatacaacttcaacatcataaatattcacctcaatacggaattttttcaatctatccagatcctatattaccaccacgtccacttggggttcca

SEQ ID NO: 5273 - DNA, 271 bp, Cyanidium caldarium
  Clone ID: LIB190-061-Q1-E1-B9
cccggctcgacccacgacgtacgattgaaaatgtcaagtcgaagatacaagacaaggaaggtattcccccagaccagcaacgtttgatttttgcaggtaaacagttggaagatggtcgcactctctcagactacaacattcaaaaggagtctactcttcacttggtgttgcgtttgagaggtggctgttagtgagtttatcctgaagttgtttttctgctagttgtttgtggtttgaataaaaatttgtttgtggaaattttgattcgtaa

SEQ ID NO: 5274 - DNA, 423 bp, Cyanidium caldarium
  Clone ID: LIB190-061-Q1-E1-C11
aattcccggctcgacccacgcgtacgagagaagaaagaaaagaagagaaaagccgtactgaagaccgacacaggtactcgaggagaaaggagacccaaattaaggtgagagaatggacgataaggaactaggcaaaaggatatggtatctgcggtagaacatatgaaagaagcagcaccgactgtttagcaaaaacacagcactctgcagaaaagagaaaatgtaaagtatagagtgtgcggcctgccaaatagtagagaagaaatcgatgaaagtgaaagcgagtaaaagatgaggtatagagaatggcggtcctaacggtaaggatccaaaggtagcgaagtaaatagacgtttgaaaggcgtccagtatgaaaggagaaacgagtgtagcactgtctagtcgtccaactcagcgaaacag

SEQ ID NO: 5275 - DNA, 322 bp, Cyanidium caldarium
  Clone ID: LIB190-061-Q1-E1-C12
gtacagctacgaattccgggctcgacccacgcgtacggtctttgtgaatctcaggcaacactgacgtattcttagcctctttttgtttttcctagtcatttctttgtcaggtgtagaactttgttgaacatacatatgcctgattgggggtttatatcgccttttgttgccaaggaaacattcagagctcagcacgcacctggttcctctctttttgtttcaaattgttgctcctatagactgagaagcaatcgatttgcttcattgagtgacagcagagttagaagactatgattgagtgtttacatgggaaaggttttcg

SEQ ID NO: 5276 - DNA, 373 bp, Cyanidium caldarium
  Clone ID: LIB190-061-Q1-E1-C5
taccggctgcgaattcccggctcgacccacgcgtacgggggaattgggtttgattatcgccttggaatgggaatacctgatatgtggattgatctagtgaccaattttcgagatgaagattgggatatgggaagaatggtgtatggggtgaccaacacaagatggaacgaatatactgttggatatgtacaaagtcacgatcaggctctcgttggagacaagaccttggcatttcgattgatggatgccgagatgtacgacaagatgtcgatatttatttctccaaccgatcgaattgttcgtggaattgctttacacaaaatgattcgccttataacgtatgctttgggaggtgaagcctatctcactttta

SEQ ID NO: 5277 - DNA, 390 bp, Cyanidium caldarium
  Clone ID: LIB190-061-Q1-E1-C6
taccggctaacgaattcccggctcgacccacgcgtacgcccacgcgtccgacttttgacaactttcctggttacatgaagtcttatatagatgtaggacaaaaagtactaagcaggcgcagctcaccaagtcgaagtcctgggaaacggggaaaatctgaagaaacttgagagttgaatgtcgatgtatagacggccactaacggccacgacggtccgcagtctcgtaaagaaatagctcactacttgtatgaattgatcacctattagatacactggaatgaacagtcttttagttgtgttctcgaacccgagtaccgagcaattattgattgaaaaagtcctcaggtaatggctacaccaaagcttcgtttgttagaccaagaaaccc

SEQ ID NO: 5278 - DNA, 192 bp, Cyanidium caldarium
  Clone ID: LIB190-061-Q1-E1-C7
cccacgcgtccgcccacgcatccgaaaacgtcatgcagtagcctataccttctgctgcagtcaaaacagagtacgtggaccagggcaagttgttatagaccctgtaagacatacaacaagtcctcatgtcacttgacgttctgttgtaggaatacgatcttgctaccgagtagttactactgcagatacatt

SEQ ID NO: 5279 - DNA, 448 bp, Cyanidium caldarium
  unsure at all n locations
  Clone ID: LIB190-061-Q1-E1-C8
taccggtagcgaattcccggctcgacccacgcgtacggaacaaccacaatataatatattccatcgtcatcgagtagagatagaatacgaacctctttatagagagtttggtttaggtacgacgatttggtcacctttgggctgnggtatattatccggaaaatacagtgggaagaatattcccgaaggttcaagattatctctggagaagtacaagtggctgaaagatactgcattttcagaaagagagtggcaaattgaaaagacggatcagttaaagccaatagctcaagaactgggttgtagtgtggctcagctggccatagcttggtgtgcagccaatcctaacgtctccaccgttatcacaggagctactacgttggaacagctggaagaaaatttcaaggcagtgagtattgttcctaaattgacacccgaagtcatgagc

SEQ ID NO: 5280 - DNA, 387 bp, Cyanidium caldarium
  Clone ID: LIB190-061-Q1-E1-C9
aattcccggctcgacccacgcgtacggccttgtcagtcatcaagtcggatagaaaagttttgactgcaattagtatggacactttttctaatactaataatagtactaataataatggtgacgatacggaggaagtgactttggagtttgaccagcaactcaacgacgatgaagtagacacgagtccacaacgttcaacgcctcctcacggttttcacccggaaaagactcttcactcggtttcttctcctactagagaaggatatagtacagggttgcatatttggtttcccgataaaattctttcttctcgtcacgaggcaggagaatactctagttatacgctggacgacaaaagtgtgcagtcacctctgttacatcctcctc

SEQ ID NO: 5281 - DNA, 420 bp, Cyanidium caldarium
  Clone ID: LIB190-061-Q1-E1-D11
aattccgggctcgacccacgcgtacgaaaggaaaggagagaaagagtggaagaacatgaaagcacagaagaatgtaagaaatggttagagtaaaaaccataaaggaagtaaaagcgggaatctgagaggaggaaagccagattggaactgagaaaaggtccaaacaagagaagtcagcagtggggaaaattgggcaatgtacagggaagtatgacccagtaatgaggagtggagtaaacagaaaaggaagtaaaaggagggaatgaagggaagttatggcaaaaacacgtgccagcagcagcggtaaaacgtgtgtagcaagcgtagagcagaagaactgggtgtaaaggtcgagtagtagagtaagtgtaaaagggaaaggaaaggagagaaagaggaaagggatgaaatgcagagatc

SEQ ID NO: 5282 - DNA, 430 bp, Cyanidium caldarium
  Clone ID: LIB190-061-Q1-E1-D12
ggtaccagtcacgaattcccggctcgacccacgcgtacgcccacgcgtccgcccacgcgtccgagaggttttaccaagtctgattacctggttgacgctttattacgtagtcacactgaaggtgagagacaaagggttgctagagaacaagaaaatacttcacagtatgggtcaggtcggaatggaatggaaccttcttttgcagataaatatgaggttccagtacatattcaagacaacgattcctcaccggattctggtgaagaatcaggaaaggaaccacatgttattcctcgccagcaagtgaaagattcagagttttcaagacttggacagcaattatctgaaagagcttggggctctttgaaggctttgctcttttcattcttctccatggacgttgcacagtattattttcgtgaatatctac

SEQ ID NO: 5283 - DNA, 411 bp, Cyanidium caldarium
  Clone ID: LIB190-061-Q1-E1-D9
aattccgggctcgacccacgacgtacgcccacgcgtccgcatggaacgtatcatgaaggcacaagctttgcgtgattcgtccttggcaatgtacatgtcatcgagaaagatgatggaaatttatccgaagagtgccagggtgcaagaattgcgtcaccgtgtggaagcagataagtcagacaagaccgtgaaagacctggtcaattgattatttgacactgcattgttgacttccggattctctcttgacgatcccaacgtttttgcctctcgtactcatcgcatgaataagttcggtcttagctttgacgaagatgaagtcactgaaaagatggaggaagatttaccccctcgcgatgaccgagcaagaaggaacatctgcaatggatgatctacactagcccttggact

SEQ ID NO: 5284 - DNA, 426 bp, Cyanidium caldarium
  Clone ID: LIB190-061-Q1-E1-E10
gtaccagtcaggaattcccggctcgacccacgcgtacgcaagaatggtttttctctcgtatttgctgcagtggctgcagtggctttgctcgtttctcttcggaatagaaagcgtcgaaatactcaacagactagtgctgtttcgaacgaggcaatgaacgaaactttttgttttgaatattctgtaggaaacaagtcttctgtctcttcaggttcctatgcaactacgacaagaaatacgggagggagactaaagattatatttcgtggtgttactcgagtgactttaggaacagacttggagaagagttgtatatttcgacgagtttcttctttaggtgaaggggaaaaagtacaaatagaccctgacaagttacatgggttgatgcagctcctatctctttttgaagttttcttgattataaga

SEQ ID NO: 5285 - DNA, 429 bp, Cyanidium caldarium
  Clone ID: LIB190-061-Q1-E1-E11
aggtaccagttgggaattcccggctcgacccacgcgtacgcccacgcgtccgcaacgtgtacagcaatttttagagccttctgtttggttggagttttcaccactatcatccttgtgtgacgctatcaacttgggtcaaggctttcctgagtggaagccacccaagtttgtaacggaagctgcatcgaaagctacgagcgacccaagttggagtcagtatgcacgttcgagtggtttacagtctttggtatcgactattagtaaaacttatgcgcctctgttgcaaaggaccattgacccttttaaagaagtttgtgtgactgtgggagcatcggaagctatctttctagcttgtcagtctttggtagaacctggagacgaggtcatctttgtggaacctgcattcgatatatatttcggtgctgtaat

SEQ ID NO: 5286 - DNA, 380 bp, Cyanidium caldarium
  Clone ID: LIB190-061-Q1-E1-E12
gaattcccgggtcgacccacgcgtacgggtaaacatggtccgcttcaagatgagacagttgcaaagattgccaagaaacatggaaggacacctgctcaggtattgatccgatggtgtctacaacgtgggtgttccgtgattccaaagagcgtaaagaaagaacgtatcaaggaaaactttgatgttttattcgaattgagtccacaggatatgaaggaattggaagccttagataagaacataatcctcaatcatcaaaaggaatattggggtttcaatattcacgcttgagagagtctttgtcgtacaataaacaaatttcttgttgttgctggcaaaaaaaaaagaatagggaagagacaagaaaagtaaataggaag

SEQ ID NO: 5287 - DNA, 282 bp, Cyanidium caldarium
  Clone ID: LIB190-061-Q1-E1-E5
taccggctacgaattcccggctcgacccacgcgtacgccacaacatgcaacaagacgaggatgtggaatgctttccgattcagtcacaaacgactagtctcaaacgcaataaactaatcaacgatccagttcagggacaggtggagttgcaaaaaaaaaaaaaaaaaaaaaaaaaaaaaaaaaaaaaaaaaaaaaaaaaaaacaaacaaaaataaaaaagaaaaaaaaaaaaaaaaaaaccacagaaaaaaaaaaaaaaggggggccaccggggaggaatcc

SEQ ID NO: 5288 - DNA, 444 bp, Cyanidium caldarium
  Clone ID: LIB190-061-Q1-E1-E7
gtaccggctaacgaattcccggctcgacccacgcgtacgcgttcttgtcagttccaataaggaagaggccatccctgcgaatcttcgattggtgtgctttgcgttcgttgcctcgtgccgtattgaaacaaaaactctgtgttgttttcgtgctgggagactcacttttttcgttgctgtagttgttctagtgaaactcatagatggcagctgtgctttttgaagacgttttttctgtagcagaggttgatatggtaaaggaccccaaggatccttctcgcaagataaaggaaaagaagtttgacaaagtttccaggatattatgtcacggagaaaattatcaaaccgaactcttgctggacataaatagcgaaatttatcctattcaagagaacgaaaagtttgagatggttttagcgcccacactttcgttagacggtcgac

SEQ ID NO: 5289 - DNA, 367 bp, Cyanidium caldarium
  Clone ID: LIB190-061-Q1-E1-E8
taccggcagcgaattccgggctcgacccacgcgtacgattttggattccaaccttgtgtataccttgctaagctgtttattcctactgatctttctacacacaccaacaactacatacatgtattgcgtgcgagaagccgggagcgggagatatttatgctaccatatccaaagaagagctatactctccacttgcctacaatcttctataagaaactaaaccttttcgtcaccctgattcaacaacggttgctgatgctccgtcccgtaacccttgtgtcaaacaccaacagtattgctaaaacttacagactcacgggtttctgcaaaatccactcgggtggaaaggatttccatgaaccccact

SEQ ID NO: 5290 - DNA, 414 bp, Cyanidium caldarium
  unsure at all n locations
  Clone ID: LIB190-061-Q1-E1-E9
aattcccggctcgacccacgcgtacgggcctcgaatggagctcggaagctattcctttgttggcacatatgaagcagcttttagccgttacaaaagctaccacttgaagaaagagtgttctataaaagcaagatacggtgcaactacctcgtcacctactcttagaagtctgttgtacttgagaaatanaatggaagaaagagacccacatgataagagtttcttctcaaggctttttcactcaagccttagattttgtagacgatgtggaaaagcattcgtagcagctgtaccaattatccccacccaacttgtagagaaaagtcctggtgtatagtggaacaagtttttgttcgaagatataatgcttgctaacacaaagtttgatagatatgtccttccagatattgcaat

SEQ ID NO: 5291 - DNA, 383 bp, Cyanidium caldarium
  Clone ID: LIB190-061-Q1-E1-F10
aattcccggctcgacccacgcgtacgcggacgcgtgggggttgtattgcttccctcgaatcaaaaagagtctgccgtatacgaaactaaccgaataataagtttgcttgaaaaattgtttgatactgctttaactcgcggttccttttgacttataagaagtgtgaagcactaatttataagaattgtgttatttggaaaaaactttatccataacgcaaaaaaatggagattggactctgtaaaagtactctttgtagattttgaaatacagaaacaatcgcatcggacatatgttgcatttgatgcagattttgatgccgatcaaatgttcagtaaagaattgtcgtgcactatttccaattattgcataggataagttaa

SEQ ID NO: 5292 - DNA, 412 bp, Cyanidium caldarium
  unsure at all n locations
  Clone ID: LIB190-061-Q1-E1-F12
aattccnggctcgacccacgacgtacgggtgcgttgcggcgtggggaaaaaacctcaaaaacttttgggtgcaatgctcaagcgcttatgttggaatgacatagcggattattaaaaaaaatcctccggatattaaggagaataaccaatttataaaccaccaaattaaaatttccaaggacaaaaggtaaccccaatcctaacaaggtgaaaccaataataatccaattcaaaaaaatcccatctctaaggaacagaaagaagacctgcctgctcaaactcgaacaaaacgcacacaaagacattccactggaacacaatgttacagtgctagtaaaaagacacgaatagtctcccctaccatacacgatatttgtgaaccatttggaattgtcttcagagaaagaaaaag

SEQ ID NO: 5293 - DNA, 445 bp, Cyanidium caldarium
  Clone ID: LIB190-061-Q1-E1-F3
aattccgaggtcgacccaggcgtcagcccacgcgatccgttcacttgttgaggtagttagacaccatgtcggatctttgtttcaacctgtctttaacccttggcagtaaaaagacgaattggaagcaagctagaaccgtgtgaccagggaatggagtcaactcagtgaatgcaagcacaagaataggcgaagattactctgttttacttgccttggtcagtcgtcgttatccgacaactatggttattttgagcaagaacacaattattttcagcaagtgccgaccaagtggaaggaattggtaaaggatgttcatcgttgttttgttattgcttgtatacctggaaagaaaccttatacggtggcactgtcggactttatctacgcaacagcaagttgttttaacaacggtatacctttggaactattgaaagattcgctgaaa

SEQ ID NO: 5294 - DNA, 443 bp, Cyanidium caldarium
  Clone ID: LIB190-061-Q1-E1-F4
aattcccagctcgacccacccgtccggtggtggaaacggtggttgccttggcggacaagtatttagaagaaggtttgcagttggctatcgatgttcgccatttgtacggtgtcaaggaacgctatttcgatatctgtggattaggcggacgtttggaagctgctttgaattgcttgcgggagatgagtcgcgatccccagttaccttttcatattcctcgaactcgaggttgtttctatcgagcatgggcacgatatatcgtagaaaaaggcacttgtttaggaggaatagaagaagcattgcaagatatgaaatcttgtcaagtaccttggaacgagccatgtgtgttggcagctatttgtatgtattccgagttgggatatccacaaccaagcgttggatatgttgccgccggcgggtgtcgaacgcttttggttacctat

SEQ ID NO: 5295 - DNA, 326 bp, Cyanidium caldarium
  Clone ID: LIB190-061-Q1-E1-F5
taccggctcacgaattccgggctcgacccacgcctacgcccacgcgtccggtgtgtgtatgtctgggaatagagacattgataccggaaacccttatacctctgtaagtataaagactacatcccaaccaactggcaccggggccaaaggataatgtaaaaacattctaccttatatcagaggtatagctactcttagattggtggattgtttggccacagtaatccacaaccaacatacaggtgacattagaactacagcactaccagggtcatcaactaaccaacacattgaaacgctgtctaaaggtatataaacggttatac

SEQ ID NO: 5296 - DNA, 420 bp, Cyanidium caldarium
  Clone ID: LIB190-061-Q1-E1-F6
taccggctaccgaattcccggctcgacccacgcgtacgggttggacggagcaagcaagaagaatgtggtggttggtctagaagtactaataatagtggttgagacatcgttgtgaagatagtttttcaattccgttgtgaggagtttaggagatttgttgttggaaaacatatgagacagtggatacaactagtaacgaggtgttggcacttgaggagggtcaaggtcccacccaactccttgccgtggagcagtacagaagtgccttggagtcgtcgtttttgggataacaaccttgcatttttatctacgataaactactctcaaagcattgttgtgcctcaattcaataaacttgtggaaacgagtgaacatcggttggacgagtttccaggtgtcatccagtctccataactgggg

SEQ ID NO: 5297 - DNA, 317 bp, Cyanidium caldarium
  Clone ID: LIB190-061-Q1-E1-F7
attcccggctcgacccacgcgtacgcccacgcgtccgcccacgcgtccgcacagattgagttgcgtgccaagaattatgaagaagctgctcgtctcgtctctttggtggagccattggaacgtaccagtgtgtagggatggcaaacctatgctcagatagaaagtgctcagggtcatttggaacaagcctatcattactatttgaaggctcttgagttggatcccaacaatgtactagttatcgaatgtctggcagaattggaagcgaaaaacggtaatgcttatgaaccaaggagtatttttagaaaagctattga

SEQ ID NO: 5298 - DNA, 400 bp, Cyanidium caldarium
  Clone ID: LIB190-061-Q1-E1-F9
gtaccagtagggaattcccggctcgacccacgcgtacgaatcagacgaggatacccgctgaacttaagcatatcattaagcggaggaaaagaaggcaagtagagggcggcccgagaaaggagagggcgtaagacgtgatacagagtaggaggaaaagagaagagagctagaaaggaggtaaaagaagagtaaaaggactagaagaggtacggaattcacgaggaaggagcgtgaaggaaggaggaatcccaagtaatcgaggaagaaaaagcttcggtgaaagcgtgaacggattttgtacacactgcccgtcaagttctggaagtgtgctaggaataagcaggagaagtagaagagagtaggaaaagaagaaaggaagtgaagacgtaagacgtgaaaa

SEQ ID NO: 5299 - DNA, 333 bp, Cyanidium caldarium
  Clone ID: LIB190-061-Q1-E1-G1
acgaataacacaactattccttattttcgcaaaacttgtgccttcagtctaaagatgtggcgtcctttgcaaaaatcagcatacttttgcgtccataataatgcgcaaaccaaagactatcggcaagagctaaaacaagggcaccaacaatcagtgtaacaaaccctcgaatggtttcgactatatacaaattagaatgaaaacattcaatcaacagaccgttccaagtaaacacacacactagaaagcgctgatacacaaaatgcgccaaaaacgacaaatagtcctgtttcactttcccctgaaagcttttctgtcaattttgtcccatga

SEQ ID NO: 5300 - DNA, 414 bp, Cyanidium caldarium
  Clone ID: LIB190-061-Q1-E1-G10
gaattcccggctcgacccacgcgtacgcccacgcgtccgcgtcacgagagaaagagcgagagaggttatgggagacggagggataggtaagtaaatacgaggcgacctggtttttttttccatcccacgttggtagcgtttgtatgtacactcgttggttgtattgcattgttgtggtttctattacaactggctattgccaatccgcaatatcgtagttggaaaaaagagtggatagctatcgttgttgcgtcgataggtttgggagaaggattgctatttatgttgatatacagtggacaaagtttatgaactagggttggttttccctggtagttgaggacaggtgaaatattttcctggttgcttgtctcactcgtcgagccccttgttgtaataaattgccgctagcct

SEQ ID NO: 5301 - DNA, 413 bp, Cyanidium caldarium
  Clone ID: LIB190-061-Q1-E1-G12
gaattcccgcgtcgacccacgcgtacgcctgctcctccacctatggattatattaagaattctggaggtcttcacaatgatatggcaattcatgactttgatatcgcacgttttatgacgggaagtgagtgtgaagagattactgcttatggagcttgtcgtgtggatccaaaaatagcttcagaaggaaacgatatcgatactgccattacgcttctcaagtttaagaatggtgctttttgtacgattgacaattgtcgtcaatcaccttcgggatatgatcaacgagtggaagtttttggttccaaaggcctcgttcgttttgggaacaactttcccaataatgtctttattgaagatgcgcagtccgttcgaagaagtgatcttccctttaacttctttatggatcgtta

SEQ ID NO: 5302 - DNA, 449 bp, Cyanidium caldarium
  Clone ID: LIB190-061-Q1-E1-G3
aattcccagctcgacccgcgcgtcagcccacgcgatccgaaagaggcaaatacgggaaagcagtaaaagaagaaagagaaaggaaaaaactgagtatcaggaagaaaagagggagtagatgaggaaagaaagatcaaggaggtaagagtgagagaaggagtaatgtgaatgaaagcaggaaagtatttgaagaagagagtgtaaagcgcgtaccttttgcataatgtcccagcgagtgaaagaggaagcaaaaagaaagaaaaagcccagaagccaagataaggtatcaaagtaaagaaagaaggaaaaggagaagaagagagggtaggcttagaagcagcaaaccagagaggaaagcgttaaagcaatgaaagaaaagaaatccgaaaaagaagagaacaaggtaagaaagaggaccgaatcagggtaagacgtagaggagcaagaag

SEQ ID NO: 5303 - DNA, 447 bp, Cyanidium caldarium
  Clone ID: LIB190-061-Q1-E1-G4
gaattcccagctcgacccgcgcgtcagcccacgcgatccgatggagtccaatgcacaagagcgcccacttgtctttgtgacaagacaagaaagtttctcagcagctcatagactgaatagttcgaagctgacggaagaggagaatgtggctatttatggaaagtgtaacaacgaacactttcacggacacaacgttgtatactgtgaaagtaaccattcggggtccagtacatccagatactgggatggtagtgaaccttagttcgttgaaggaagccataagagaactcattgtggagccttttgatcacaagaatttggacttggatgttttcgaattctgcaaattaggtattcctagcactatggagaatctagtttgtatcatatggaagaaattattcagtcggttcaaggacttgctttacgacgtagttgtacaggaaa

SEQ ID NO: 5304 - DNA, 389 bp, Cyanidium caldarium
  Clone ID: LIB190-061-Q1-E1-G5
gtaccggctaccgaattcccggctcgacccacgcgtacggcagcaaacggttcaaaaaagggtatttagtaaagaagaatgggaaaaaaagttgtctcaagtacaagtggataggagggacctcaacttgttggtgatcaacggggtcgtgatggaagggtacaaggatgctgcagaaaagttctccgaagaaacgggattggatcctggtgtggacctaaatactataccagacagaatggctattcgaactgctgtgcaacaaggagatatccacaaagctagcgaattggtcaacgacgtcagccctttgatattggactccaatccttgtctgttctttcatctgcaactgcacatactaatagagcttattcgacagggaaata

SEQ ID NO: 5305 - DNA, 438 bp, Cyanidium caldarium
  Clone ID: LIB190-061-Q1-E1-G7
gtaccggctacgaattcccggctcgacccacgcgtacgcccacgcgtccgagaacgctctgtcaaaaggagatagtgaactatgtcataagctatttgttgaaaatcctagtgctctgacaaccctacaacgccatatgcgcgcccaggagtttcctgccgaatatttggacttggcacgaaaggttttccatgacttatcaggcaatacaatttcaaaccaaggagaaggcgaacgaacagtcttccaattacaaattgcacttgcttttctaaagcttgagctgcaactgccaaagtggtattttgaaaggcggcagttggaggcgactttttcgattgttatcaatgaactgctgagtaactcaacaactatcgttcgcattctgacacggggaaacgctgtgcaagagcaacaacattgtacattatgtgaatc

SEQ ID NO: 5306 - DNA, 429 bp, Cyanidium caldarium
  Clone ID: LIB190-061-Q1-E1-G8
attccgggctcgacccacgcgtacgtgatattcttttcgaccaacgctcaattgaaacaactatttcaaggctcttcagagacattagatatttcttatgtattcttgtcaggtattagtgccggatgtttagcgtgcggtattatccactcctatggatgtgatcaagactcgactccaatctgccaattctccttatcgaggtattatcgattgttttgttcggacattgcgagaagaaggattgggcaaattcttttcaggttctattgcaagagcttgtattgtatctcctttattcggaattgctctcttgttttatgaaattcaaaaaagattggcgtcttcattggacaactagatctgcacaactacaatccacacatacgatacagccatcatctcctacagatattacacgagtggaat

SEQ ID NO: 5307 - DNA, 384 bp, Cyanidium caldarium
  Clone ID: LIB190-061-Q1-E1-G9
aatgcccggctcgacccacgcgtacggaaaggaccacacatctattatgtggatagtgaaggcacgagattgaaaggtcaaaagttttctgttggttctggttctacccacgctttgggtgtgttggatcaaggttagcagtggaatatttccgtggaagaggcctgtgaacttggaagacgttccatctatcacgctactcaccgagacgcatttagcggaggctatattaatgtgtattatatcggtcctgatggttggaaatttataagtcatgaggatagtggattcgataagcattatcaatacgccacagaaaaagccacgcaacaacaacaacaaatgagcatatcttgaaataaatttcaccgtttctttttgcat

SEQ ID NO: 5308 - DNA, 422 bp, Cyanidium caldarium
  Clone ID: LIB190-061-Q1-E1-H11
ggtactagttcggaattcccggctcgacccacacgtacgcccacgcgtccggggaagttatggcaaaaacacgtgccagcagcaacggtaatacgtgtgtaacagacgtagagcagaagaacggggtgtaaaggtcgagtaatagagtaagtgtagaagggaaatgaaacgagagaaagaggagagggatgagatgcatagatctctagagaaaggcatgaaagagaataatggaagacacagtaaatgatgcgagaaagcatatgaagtgaaacggattatgaacccgtgtattctatgcagtaaaagaaagaatgagtaagaaacaagggagtcattccaccaggggagtaaaggcgcaagaaagaaactcagagcaattgacgggaatcggaaaaaggggtggatcacgtaaattaatc

SEQ ID NO: 5309 - DNA, 426 bp, Cyanidium caldarium
  Clone ID: LIB190-061-Q1-E1-H4
agcccacgcaaccgcccacgcgtccgcccacgcgtccgcaatatgttacgcttagtgtttcaagatatttatcctgtgaacatgcgcaaggaagaagatgaaggaaccttgtttgggagatgtccagatgatatttatgatggctatactagtaacgttccaggaaatccgtggattctatgtactttaggaatggcgcaatattattatgagttggcagcagagtggttgaaacatgaaaagattgtcataggaaagtggagcaaagactttttcagacatttgagggttatgcctcctccttctcctcctcaatcttctatatcgacgaccattactggaaaagccgattggtatttatgtttctgcgctattagaagaaggagatcgcgtattgaatgctattcgaaagcatacagttcctag

SEQ ID NO: 5310 - DNA, 332 bp, Cyanidium caldarium
  Clone ID: LIB190-061-Q1-E1-H5
attcccggctcgacccacgcgtatgcccacgcgtccggatgaacatgccgaacagatgagcaattgtttggatgtcattcgatattttagtactcacttgtatgcttcataaatacacttgatgcctaagcttttggcaaaacaaaaaaaaaaaaaaataaataaaaaaaaaaatatataaaaaaaaaaacaaaaaaaaaaaaaaaataaaaattaaaaaaaaaaaaaataaataaaaaaaaaataaaaaaaaaaaggggggccccccaaaaggatcaaatcttattaacccttcaatgcaacttaataacccttcaaaaatttcaccaaaa

SEQ ID NO: 5311 - DNA, 370 bp, Cyanidium caldarium
  Clone ID: LIB190-061-Q1-E1-H6
aattcccggctcgacccacgcgtacggcagtttccacctgtaacctacgatcttgcctacttgcctgaacccatcaaacaaagtattgtgggtgctgctcttggaagtttatttgccaacgcactttgtggtttcagtcgttgttttgaagccaacaaaggacgtaacggtgctctcatttctctgctacgcagtcgtttctttattgctacttgtattgcttggctctatttgaacgatgtttgtgtgggaaaagaagaatctgtttccactttattacccagttgtccacttggcaagaactttgatcacaactttgtttgggcacttgtattagtagtcatcaacgtattacgtgcaaaaggtgcac

SEQ ID NO: 5312 - DNA, 342 bp, Cyanidium caldarium
  Clone ID: LIB190-061-Q1-E1-H7
attccgggctcgacccacgcgtacgcccacgcgtccggtaatctgagattggcagcgttctgggaaaagtatcggtacaacatcctttgtatgaggttcaaaagaataccgcagaatatgagataagagagtacgggagcttaagaatagctgaagttcatccttcagactggactcaagaagagaatggctcggcatacgactttgactcgcaagcatttcgagtgttggcgtcctacattggtgtgtttggagaagccaaacacacagatagctccaacacgcaagttaagatagcaatgacagcacctgttttatcacagcccatagggtccgtggaaa

SEQ ID NO: 5313 - DNA, 442 bp, Cyanidium caldarium
  Clone ID: LIB190-061-Q1-E1-H8
aattcccggctcgacccacgcgtaagctacagtaatgctggacaaggggtatacactatcacgtcgaaagcagagttttgtcgtcttcgagaagaactgaaaagtgtaaagtatcagaatttcattgtagaaagctggagtaagcaatcatgagtggagctctgtgtatgaaggtactcgcctgtttcatatgggaactatacctgacaaacgcggaaatattcatgtttttgatcttcgaatgatggtctctggctcggaggatggatttaaagttgtaggactatatgcgagacgggccaagaaacctctttcaaaacagctcgaagatggaatgaactcttgggacatgttaggaacgaacctcagtattaaaatggatgatggaaactttggaagcgaaccggaaagattgctgttgatggattcaagagatttcaat

SEQ ID NO: 5314 - DNA, 405 bp, Cyanidium caldarium
  Clone ID: LIB190-061-Q1-E1-H9
aattcccggctcgacccacgcgtacgaacaaagttacctcaaccaaaggaagtcatgcagaagccctccttttggtccgttttgaaggattccataggaaaggatctttccaagatatccatgccagtaacctttaatgaacctaaatcctttttacaaaggatggcggaagatgtggaatacagcgaattgctggataaagcagttactttagaggatgagtttgatcgactgttatatgtgagcgccatggctgtaagtcattatagttctactgtgggtcgaaccggaaaacctttcaatccaatcctaggcgagacgtatgaattgtttcttccagagaagaatttgcgctttgttagcgaacaagttagtcatcatccacctataagtgcttcccatgca

SEQ ID NO: 5315 - DNA, 211 bp, Cyanidium caldarium
  unsure at all n locations
  Clone ID: LIB190-062-Q1-E1-A11
gtaccgtactagaattcgncggtcgacccacgcgtacagagtatcaggaagaaaaaatggaagaggaagcgaaacgtcttcgaacgctgtggatgtgaaaaaggaagtagcaacaaaaggaataatttttgttggtcatgtccataaaagctataattccaatagcaactgtactcaatttcgatgaagcaaaataaaccactttttaatg

SEQ ID NO: 5316 - DNA, 215 bp, Cyanidium caldarium
  Clone ID: LIB190-062-Q1-E1-A12
ggtaccggactagaattcccgcgccgacccacgcgtccaaaaaaaaaaaaaaaaaaaaaaaaaaaaaaaaaaaaaaaaacaaaaaaaaaatgaaaaaaataaaaaaggaaaaaaaaaaaaataaaaaaacgggcggccgcccaagatggatccaaagcttaacgttccttgcatgccacttcacagctcgtcaaaagcgtcacctaatttcaatt

SEQ ID NO: 5317 - DNA, 431 bp, Cyanidium caldarium
  Clone ID: LIB190-062-Q1-E1-A5
cccgggccgacccacgcgtcagcgaactacgccaagttaaggccgaacaagatgcaaaggatcgcaggttatttggaaatatgtttgcacgtttaggacaaattgaagacgatattcataagaaatcaaacgaagaaaccaaggccaaagaaatcactgcctcttaatgagctcaactttttttatttgcagttaccatataaagaggatctaacatgtcgttttagttttacaacagagtactttgggcagttacctgtgataccaaaattgggactcaagtcgtacgctcttggagtagtaaacattccactagtgctcggttatattcgtgctttccatctatatataagttacttgcctataatggaaaaaacttccaacaatatatactcgttgctataaaatacttttatgaacattcttcgtcc

SEQ ID NO: 5318 - DNA, 413 bp, Cyanidium caldarium
  Clone ID: LIB190-062-Q1-E1-A7
ccgggccgacccacacgtcagcggacgcgtgggctgcatagctctgatggatactatagatatatagtcgatggaaatgtgatattgggagataggaatccatccaccaagcatcatcttattgcatcgtgtgagaattgggatgatgcaataagagaacagtctgtttatcgagttgggaaacgaatgaatcaaatagcagcagaatatgaaatatttcaaatggaaacggaagcaaccgttggattatttcatgcgatggagttgcatcttgtggacattatccaagcaactcgacaacaacaataactaggaggaggaacaagaagtagcaatatatatcgaccatggaccaatagattgactactcgtgacctttttcgtttgacggaatatgctcaagatatattggg

SEQ ID NO: 5319 - DNA, 443 bp, Cyanidium caldarium
  Clone ID: LIB190-062-Q1-E1-A9
ttcgccggtcgacccacgcgaccgatttatttagcctcatccatatcaaccacttgtcgcaaccagtggcatagacaacgatatccaattgtggacgccgagttctcgtcccaatgtattgagtgaatatgatatggataagcgagtgaataagaatatggaaaagttgaatgaaattctcaaaagaccgcattccgtcggcaatagtccagaagtaagatatttgcgtgttccttatcgtttgtactgctaatgttgagttgcaatagacttttgctcatgtcattcagaacttgatgagactagagtatcttcgacctcaagattatgaagcaggttgcactattctatagtcagtgaacatttatgacttgtggtatcaagtgcatgaattatattatgagaaaaaagattttccagataaaggatgattatatttttag

SEQ ID NO: 5320 - DNA, 425 bp, Cyanidium caldarium
  Clone ID: LIB190-062-Q1-E1-B4
cgggccgacccacgcgtcaagagaagatcaacttagatggcaaatgactccgaggaactaacgaagctttttgaccaatatataaatacttataaagagtcagggtggtgtatagaccagcagaacttgcaaataataagagtgttgggtaatggcgcaagtgggacaacttacgaaggaaagtatcgagatataaaagttgcagtgaaggcttattctgcaaagatattaaaggaggattttgtaagcgttcgtaacgaaatggagcttctggcacacttgtcacaccctaatattattaagttttatggtatttgttttatgacaaaccccttcgctgcttgcctcgtaacagaacttgccccaaacggagaacttggcaaggcgctatatcccagatctggtataaacatcttttcaaagct

SEQ ID NO: 5321 - DNA, 431 bp, Cyanidium caldarium
  Clone ID: LIB190-062-Q1-E1-B6
aattcccgggccgacccacgcgtccactctccattacgattcgatctgtttatcaatgagttacttatagacgatttgggaaaattggagcccgtgtggtggcatggtagcagcttcggtagagtgtgtcgaacgccgatggaatgttgagtcgcaagcatttccacgaaagcctacacatcaatccatgcggaattggagtggcgggtcgctttacccactacaccacactacactgtggattttaatcattaaaaaggatccttgtcgggcttgaattttgtttctttaggtagaacacattataaattggctcagaatttaatttacgatgtgccatatgagggtacagatggctgtttggcttggggaagctgcctgtaagatcgtatttaccacttagggaacatagttcgcaatgttattcacac

SEQ ID NO: 5322 - DNA, 415 bp, Cyanidium caldarium
  Clone ID: LIB190-062-Q1-E1-B7
aattcccgggccgacccacgcgtcagcccacgcgtccgcccacgcgtccggttggtggtgggctgctgttgccatatcgttggtaagcaaacatgggagcctacaagtatatgcaagaattgtggagaaaaaagcaatctgacgttatgcgctttttactccgcgtccgtgcttgggaatatcgacacttgccttcggttcaccgagcttctcgtcccactcgtcccgacaaggcaagaatgcttggctacaaagcaaagcaaggttatgtaatctacagagtgagagtccgtagaggtggtaggaagagaccagttccaaagggtatccaatatggcaaacctaagaatcagggtatcacacaactaaaattcaagagaaataagagatcagttgcagaagagcgagctggaag

SEQ ID NO: 5323 - DNA, 301 bp, Cyanidium caldarium
  Clone ID: LIB190-062-Q1-E1-B9
attcgccggccgacccacgcgtccacccacgcgtccgcagtgaaaccacaggaaagcagtgtcgctatggggccaagttggcagcatattgtagaagaatatgacccacggagacccaacgactttgagacttgtgtgagagaaagagagtggagaaaagcacaacaagtccagtcaagttttgcacagtgatacatatctatatgtatagagagagagagagagagagagaaaagtttacagctgtttttatgtcgaggttgtatgaaaaactatggaggatgaaaacactttttgcgcc

SEQ ID NO: 5324 - DNA, 390 bp, Cyanidium caldarium
  Clone ID: LIB190-062-Q1-E1-C1
cgggccgacccacgcgtccacccacgcgtccgaattcatttgccataatgacgaccactggttgttgcttggaaaactttgatcatacgccatcagaaagtgcttcttttggtgtacgggaaagaaaacgaaaggaacatgttgataaaacatcaaagactcccaagtaaaacacctcaaggagaccgttttatacctaatcgaaatatgatgaatattgaagtttctcgacttcatctacaacaagaaattcctggaaaggaaaacaaacaacacaataatacctttcaagatgcacttttagaaagtaatagtgaatggagaaagaactttttttcatcatcgtcgtcgtcaacttgtcagccgtatcaaagtgctttggcaagttca

SEQ ID NO: 5325 - DNA, 321 bp, Cyanidium caldarium
  unsure at all n locations
  Clone ID: LIB190-062-Q1-E1-C11
acagtcatactaaaactttgctgtgtcatatgcgagcaacaactaggagctcccgagtcattccgttgcatatgtcacgtgacatcctaaagtattaatgccagtgagtacaaattctaattctctatccaaaatacagccagaaccaaactctgcatcgaaacatgtatagtactcgtcgggattttttcctttgctaagcctgggacgagtcagtagctgttggcttgaatgcctgcctcttccctttctccgcttgtgcagaattgctccgcgtgtaattctctataaaagtaacaaatggagtgtntgaatgtanna

SEQ ID NO: 5326 - DNA, 432 bp, Cyanidium caldarium
  Clone ID: LIB190-062-Q1-E1-C2
cgggtcgagccacgcgtccgatctgaaaggcgaattcagaccagctcagacatatcgaatatataatacatggatgggtgatccgcttcgaatgttgcaactccacgttatcaccaacgttatcgaaggagaaaatcttttaagaagggtttcggatactggaagttttctaaagatggaacttgaaagaatttcacaagagtatccatttcttgtagccaacgtaagaggcaaagggaccttcttagcctttgatacgcctgatggagagactcgcaatcaacttttattcgaaatgcgtcaaaaaggagtccaaattggaggttgtggtgaaaatactgttaggctaagacctccactgatatttgaccaacaagatgcaaatattctactagaaacgctacaaacggtgttgaggaaatttaagaacca

SEQ ID NO: 5327 - DNA, 311 bp, Cyanidium caldarium
  Clone ID: LIB190-062-Q1-E1-C4
aaaagtcaactttgttttcgggcaaacacccggaaataatcccgttggtttccgcaattgcccggtgtgaagtttgtgcggtttttgtgagcatcaacaacttgtttaataacccaaccgtggtacccctcaattcaaagcgggaagcgtattcgcgcaattagaggcaacttgacaatgaagacagaccctttttgaatttggtgaaaccacttcgtgaccgtccaatcagtttaatttccccaaatgatgaaaataccaggattccccattagttggatagtacattaaatagttgttgagctttaggt

SEQ ID NO: 5328 - DNA, 137 bp, Cyanidium caldarium
  Clone ID: LIB190-062-Q1-E1-C5
aaaactcgcgtgttcttttcaaaaaaaaaaaaaaaaaaaaaaaaaaaaaaagaaagaaaaacaaaaagaataaaaaacaaaaataaacatgaatacaaaataaaaggcacatcaacagtgtcaccaaaaattcaatt

SEQ ID NO: 5329 - DNA, 338 bp, Cyanidium caldarium
  Clone ID: LIB190-062-Q1-E1-D11
acggacgcgtgggcggacgcgtgggtttcttggtagcagttgtacattcaacatcatcaaatgccaaagggaggaaagaaagattcttcaaagaaagaagccacaagtaaacctgcagcagcagatgctacaaagacgacagaaaagtctggtccggaagccaagttgaagggaactggtgcaaagaaacaataaaaagttgactatgcatgttcctgttatgttttgtgagttctgtttgatagtttccagctattcttttggtagtgaataaagagaaaattttttataaaaaatcactgtaacatggcggcgagacgtggcgaaagcagcttgga

SEQ ID NO: 5330 - DNA, 296 bp, Cyanidium caldarium
  Clone ID: LIB190-062-Q1-E1-D4
aagttcaacaactttacaaacaaaaaaaaacattggcggtgcacgttcaacctaactttgcaacgttaccctgtaaacatagtatggcgaaaaccaaacaatagtaaaataaaaacattccaagtcagctaaatacaccaattagaacacttcataagataccaacgctacccgttttaccccaattcccaattgttttccgaaaacttgtggtacaaaccttccttagtgaatgtcctggaacgaatcggaaaggcaccgacctttggcttaatcttcaatggcgcactaagttc

SEQ ID NO: 5331 - DNA, 449 bp, Cyanidium caldarium
  Clone ID: LIB190-062-Q1-E1-D5
ggtaccaggtcaggaattcccgggccgacccacgcgtcagcccacgcgtccggtaaaagacatcatggaagagcaacttccccaaggcacgctttctagtgtgggaaaaagagactactaaaagaactacaagattggttggtgggtgaacctgtacctggaatgtccgtggagagaccagagagattggacttgtggtatgtcaaagtagttggtgcgcaagatactatatttatgggagaagaatatattctgcggtttagttttccacgagattatcctatggaagctcccgaagtggtttttcttccaccggttcctagtcaccctcatatttatacgaatggacatatttgtttgaatgttttgtatgatggatggagtcctgcattgacagttacttccgtttgtttgagtatattgagtatgttgagtagtgcaacagaaaa

SEQ ID NO: 5332 - DNA, 437 bp, Cyanidium caldarium
  Clone ID: LIB190-062-Q1-E1-E1
ggtcaagaaatccgggccgacccacgcgtccacgcactttaggaatggtaagttatttttgtctcgagcatttgactttatttaggattttgcatatggaaatactttcgaaaccgatgcgatgggcaatttcactggggaaataagtcagcctattgtgaatgccagtagaaaggcagatttactgcaaatgttaacgatgcaagaaagaataagtttggaacaagtaattgcagtaggtgatggacccgtatctttagaaatgttgtctcttgcaggaatggcaatatctgtcgatcagccggaagccaccgatataaaatttggagcacatttatgtggaaaaagtctcatgacagttttatatttattgggcattcgaggaagagacgctttggaaatgtcacgagatactttttaggctcttccatgcgtct

SEQ ID NO: 5333 - DNA, 239 bp, Cyanidium caldarium
  Clone ID: LIB190-062-Q1-E1-E12
caggtaccggactagaattcgcgggccgacccacgcgtccacccacgcgtccgattgggcaatgtacagggaagtatgacccagtaatgaggagtggagtaaacagaaaaggaagtaaaaggagggaatgaagggaagttatggcaaaaacacgtgccagcagcagcggtaaaacgtgtgtagcaagcgtagagcagaagaactgggtgtaaaggtcgagtagtagagtaagtgtaaaa

SEQ ID NO: 5334 - DNA, 453 bp, Cyanidium caldarium
  Clone ID: LIB190-062-Q1-E1-E7
aggtaccaggtcatgaattcccgggccgacccacgcgtcaggtagaggagcaagaagagaagagagaatgctgggtggagtagcgaaacaagagaagggaagtaaaaggtaagaaagaggaaaggtttacgagagaaggaagtagaaagaagagagtgtaaggcggcgtcataatagaaatccgaaaggagtagaagaaaagagagagaagaaagaaaagaagagaaaagccgtactgaagaccgacacaggtactcgaggagaaaggagacccaaattaaggtgagagaatggacgataaggaactaggcaaaaggatatggtatctgcggtagaacatatgaaagaagcagcaccgactgtttagcaaaaacacagcactctgcagaaaagagaaaatgtaaagtatagagtgtgcggcctgccaaatagtagagaagaaatcgatgaaag

SEQ ID NO: 5335 - DNA, 386 bp, Cyanidium caldarium
  Clone ID: LIB190-062-Q1-E1-E9
cgccaggtaccggatctagaattcgcgggccgacccacgcgtccacccacgcgtccgcccacgcgtccgcccacgcatccggaggcaaatacgggatagcagtagaagaagagatagaaggagtaaaactgagtatcaggaagatgatagggagtagatgaggaaagaaagatcaaagaagtaagagtaagagacggagtaatgtgagatgaaagcaggaaagtatttgaagaagagagtgtaaagcgcgtaccttttgcataatgtcccagcgagtgaaagaggaagcccaaacaaagaaaaagatgtagccatgtaagacccgaagctagttgatcatatgcagtccaggctaaattggcgctgcaccactatctgtggcagaa

SEQ ID NO: 5336 - DNA, 376 bp, Cyanidium caldarium
  Clone ID: LIB190-062-Q1-E1-F8
aggtacaggtcaggaattcccgggccgacccacgcgtcagcccacgcgtccgcccacgcgtccgcgccctttttttttttcgtcgcaataaaaccaagtcgtcagtcagtgcaaaaaaaaaaaaaaaaaaaaaaaaaaaaaaaaaaaaaaaaaaaaaaaaaaaaaaaaaaaaaaaaaaaaaaaaaaaaaaaaaaaaaaaaaaaaaaaaaaaaaaaaaaaaaaaaaaaaaaaaaaaagaaaaaaaaaaaaaaaaaaaaaaaaaaacagagaagtcagaagaaaaaaaaaaaaaacgaaaaaagaccaaaaaaaaaaaaaacaaaaaggcaatgaaaaaaaaacccaacagagagaaaaggcacagaagacagaaaaa

SEQ ID NO: 5337 - DNA, 355 bp, Cyanidium caldarium
  Clone ID: LIB190-062-Q1-E1-G6
gacccacgacgtcagggtagataaaaccaaaaaagatatgggaggattctttccggtgttgttttcttttgcggttggtactggagttggtgtgtatgtggcacaaaactatcgcgttcccaacgtgcagtggtggttgcaacaaaccacggatattgtgaggagaatggaaagacaagcacgcaagtctcaagaggaaaagtagtgaaagaagaaggtttttttttggcgccttgaggagaagaaacaaggctattgctggggaatgaatccgtatccaattatctatagatatatatacatatatatgtagcacggttatttgtggttcccaactctttggaaatcaacatgc

SEQ ID NO: 5338 - DNA, 433 bp, Cyanidium caldarium
  Clone ID: LIB190-062-Q1-E1-H2
cgggtcggcccacgcgtccacccaagcgtccggaagagtcctgagagtcaagtcatggaagaacttgttggtcattctcaagaagtttgtggcttgaaatggtcttatgatgacaaatatttggcttctggagggaacgataacaagttgttgatatggaatcccaatcacaatttgtcggtttggagtcgattcgatcaacatacggcagcagtgaaagccattgcttggtcacctcatcaaagcggtcttctttgttcaggtggaggcactgcggatcgatgtattcggttttggaatgtgacaagtaacagtctctacaagacaatcgatacgggatctcaagtatgcaacattgcttggtccaaaaatgtccaagagtttgtatcgacacacggatattctcagaatcaaattattgtatggaagtatc

SEQ ID NO: 5339 - DNA, 205 bp, Cyanidium caldarium
  Clone ID: LIB190-062-Q1-E1-H4
aaaagtatagggggggggtatgcgcgtataagagactttcggtgccctttcaatggtgtctcctattttcttttccgggcccctctttttaaaacgttggccgggggaaaactcggtttttaccggtattaccctcttttaacgaaatcccctttgctcgactggggtttcaccttccataggcgcgtgtttttcccccttcgca

SEQ ID NO: 5340 - DNA, 428 bp, Cyanidium caldarium
  Clone ID: LIB190-062-Q1-E1-H6
ttcccgggccgacccacgcgtcagtgctttctaggaagcaacgcaacgaaattgttccaattagaaccaaagtaaaggttcccgagaatccaaaagataaagcttccaagatgatagaaagagaagttgttgtggataaggacgaaggcgttcgtttaggagttaccatgtcttcattggcaaagttaaaaccagtcttcagaaaggaaggctccaccacagcaagaaatgcctcgcaaataagtgatggagcagctgctgtcttgctaatgaaacgttcggaagcacagaaaagaggacttggctgtctgggtactcttcgagcttttgctgttgtgggagtggaaccaggtgtcatgggaattggtcctgctgttgctattcccgcattattgaaaaggacaagattggctgtgaatgatattgac

SEQ ID NO: 5341 - DNA, 445 bp, Cyanidium caldarium
  Clone ID: LIB190-062-Q1-E1-H7
ggtacctagtctagaattcccgggccgacccacgcgtccacccacgcgtccgcccacgcgtccggatatttatgcccaagactctattgatcttttgacacgctctggtattgactttgatgagcacgaacgacatggcatcgacgtggaacgatttggagagcttttaatatcttccggcattgtactgaacgaagatatatgttggatttcgtttcattctggttatgactttggctatttgttgaagatattgacttgtagtgagatgccagcagaagagtctgaattctttgaacttttaaacgcttattttccacgtttttatgacatgaaatatttgatgatggcttccgacaggctttatggaggcctaaataagttggcagaaatcctggaagtcgaacgtgttggccaaatgcatcaagcaggttcagatagctta

SEQ ID NO: 5342 - DNA, 398 bp, Cyanidium caldarium
  Clone ID: LIB190-063-Q1-E1-A10
ggctcgagccacgcgtacgcccaagcgtccgcccacgcgtccgccgagttgttgggaagatatacgggctgttccaaaggaaagggaggttctatgcatttgtataaagcggagaataaatactttggaggaaatggaatagttggagcgcaagttccgttgggaacaggtttggcttttgcagaacaatatctaaatactggcaatatttccgttactatgtatggagatggtgctgcgaagccaaggacaagtagcagaggctatgaatatggcagctttatggaagttgccttgtgtttatgtatgtgaaaataacaagtatggaatgggaacgagcaccgatagagcttcagcaaataccaacttttatactcgtggagatgtcattcctggta

SEQ ID NO: 5343 - DNA, 419 bp, Cyanidium caldarium
  Clone ID: LIB190-063-Q1-E1-A2
cggtcaggcattcccgggtggacccacgcgtccgggattaggtgttggattcttgaggcatgtggaacgctgtcggttacttattcacatcatcaatggagagtcgcaggatccattaggagattatgatgctattcgacaagaacttgttttatttaatccagcccttgttgacaagccggaagtcattgttctgaataagatagatcttccacatgttgcgagtcaagttgtacaactagagacaaagttgaaagagcgatgtggtcattgtcgagtgatgtctattagtgcagtgactggagaaaatgttcaacagttattgcacaaaactgctcttttgttgaatagtttggaaagtaatttaggaagtgtggaacgcgacaccatagtcaccagaccagaagaagagaacctat

SEQ ID NO: 5344 - DNA, 273 bp, Cyanidium caldarium
  Clone ID: LIB190-063-Q1-E1-A4
acgcgtcaggcagtcgtagattaggaaccagcaatcaattctaatactttgatggttccttgactattggcaactactattagttgaggtctttttggacaccaacaaacagaactgacaaaatgtgttgtatctcgagtttcttctccagttagtggattttcactattcattctaataaaggaacaacaacaacaacaataatagaaaaaaaaaaaaaaaaaaaaaaaaaaacaaaaaaaaaaaaaaaaaaaaaaaaaagaatacaaaaca

SEQ ID NO: 5345 - DNA, 406 bp, Cyanidium caldarium
  Clone ID: LIB190-063-Q1-E1-A9
gtacggtaaggaattaacggctcgacccacgcgtacgaaactttttccaaatatggagaagttgttgatgcaagggttgttgttgaacgtgaaactggtcgttcccgtggttttggtttcgtatcctatgcagaaggttcctccgtagacgaatgcattgccgcactggatggcaaggatatgcaaggacgcactattcgtgtgaacaaggcaatgtctcgtgaacaacgcgagagtggaggagactttcgtcgcggtggtcgtggtacgatacggaggttttcgttccggtccttatgagagacgtgaacgtgactctgatcgtagaagagatcatgacaggagagataacggccatagtagcccaggtcgcagtggacgtttccgccgtcgtgaagactttgat

SEQ ID NO: 5346 - DNA, 384 bp, Cyanidium caldarium
  Clone ID: LIB190-063-Q1-E1-B11
gggtcgaggcacgcgtcagcccaagcgtccgcccacgcgtccgcccacgcgtccgcccacgcgtccgcttggcgcgcccttactctctctctctctctacgactacaccagcccaaccttgctattcacgattagatagaaaagacaaaattcgatcaacaatagaagtttcaatggaaggagtttcctgttgtaaagacttgctttccaagtttccttgtttctcgccttgttccaactggcgaactggcaggtattttgctaaataatgaggcttgttgcaaagattggaaactacaagatagatgaaaaaaactctccgacagtcgggataataataaacttcgaagagaaggacactggtatacggttccttccaaaata

SEQ ID NO: 5347 - DNA, 401 bp, Cyanidium caldarium
  Clone ID: LIB190-063-Q1-E1-B2
acgcgtcagcgaatgtctccctatacctgttgttgcatgattgggttactatagattgcaatatcacactgtgcaagcgctttatgaattgcatgttttttgagatcacacaaacacttgtacactgaatgaacgacgtatgggtactaactgtgcattttgtatagatatcaaggatgtcaaatatgttatcaactacgatttcccgaatactatagaagactatgttcatcgcattggtcgcactggtcgtgctggtgcccttggaaagtcccatacgtttttcactccggataaattccgtgttgcgaaagaattagttaacttgttgcgagatgctggacaggacattcctcccgagttggctcgtttgataaaaacttcgtcctttggccgtaaca

SEQ ID NO: 5348 - DNA, 373 bp, Cyanidium caldarium
  Clone ID: LIB190-063-Q1-E1-B8
aagctcttccttatattctttgtgcttggacaatggttgcaaagactgctctgagttgcctctttctctctttccttatcgctgccgcagttgcagccgacgtagtttcagaggagagatggggatatgctcagcaaacccaacaacagcaacagtgccaacaagtatgtaaacagtatgcatactatcagagtccagtctgcacttccgtaaccacacagagcccatactggacccaatgctcgaagactgtgcaaacctttgtcccaagccagtgcagtacttatacccaatctcctacatggacctattgcagcacctacaccaccactagcgtaccatctcaatgcagcaaggccgtgactacctatac

SEQ ID NO: 5349 - DNA, 399 bp, Cyanidium caldarium
  Clone ID: LIB190-063-Q1-E1-B9
gggtcgagccacgcgtcagcccaagcgtccgcggacgcgtgggtggatttccagacactctttgcagttgctaggctgacagaaaaccacggaataggtgagaaattctatttagacagatggagacgcaaaggagactttgactcttattggaccgttacgagaattcaaagagataacaagggagatccttccaagttctttggttactatcactacaagggtactgacttgaaaggagaaagaaaaatcgaactcgccaattgtaaaggttggaggtgcgacacacttgaaaaggagcgcaccaaattgtttggtaaaacaccgacagttccttagttggagagtttaaaaaaaaaaaaacaaccacccaaaccacaaaaaaaaaaaaagggcggg

SEQ ID NO: 5350 - DNA, 347 bp, Cyanidium caldarium
  Clone ID: LIB190-063-Q1-E1-C1
ccgggtcgactcacgcgtcagccaacgcgtccgcggacgcgtgggccgacgcgtgcgggaaatatttgaggctgttgaagttccacagaggaatgggcgcacaggatgacctgccacaagtttcaagctgtgtcgaagcctgtacggaaatggcaaaattttttaacatccgtcgggagagcgttcagttttgttcagagtgacatcttgagcaaggccaacattgtggacagttaaggcgagacatttcgtccatagaaaggctctctgcacgacatcagataaaccggactggctaacggaacttgctctgtaaaatcaccaccttcttgttccccgaactgtgt

SEQ ID NO: 5351 - DNA, 418 bp, Cyanidium caldarium
  Clone ID: LIB190-063-Q1-E1-C10
ggtcaggaactaccgggtcgagccacgcgtccgcccaagcgtccgcccacgcgtccgcccacgcgtccgcccacgcgtccgcccacgcgtccggtcttattgggggaggcactgtatttctgtctaccattccagccatatactttatggatcgtttaggaagacgtccagtgctattaacgcttattcctggagtatccgttggtctattcattattgggttttcttttaaagcaaccaatgtgaaggttgagtgaagggatatacatttggggagtagtggtctatgaattcttctggggttcttgtttaggtcctactccttgggtggtggcctcagaagtatatcctacttatttgagaagcactggtgtaggtatcaatgcattcgttgcctatttgggaacgtttaccacta

SEQ ID NO: 5352 - DNA, 400 bp, Cyanidium caldarium
  Clone ID: LIB190-063-Q1-E1-C12
gtcaggaattaccgggtcgagccacgcgtccgcccaagcgtccgcccacgcgtccgcccacgcgtccgcgctacaagaatgggacgattcttaggcaaatccctatccaactttctttcctaataacaaagtctgcaatgcttcccaaggaatacagcagtactaaccaagtccacaagcatagaaggaactgcaaaaaaataaacaatgtccacgtccgatagatctgcagaaaatagcgatcgatgatagactttttacaagggaagacagtcctttacaaataaatgacactttggaacaaaaaaaaaacacaaaaaagagacaaacgatgaaactggcgcaaaaaaacaccaaaacaaaggtacgaaaactctaaacacagaaaacaaaaggggcg

SEQ ID NO: 5353 - DNA, 424 bp, Cyanidium caldarium
  Clone ID: LIB190-063-Q1-E1-C5
ggtacaggtaaggaattcccggctcgacccacgcgtacgcccacgcgtccggatcaatcatgtccttcgctattcctgctgttgtttctaccggagcagggctatcttttggtgtagctgcttcaattgcaaaggcttggtctgacctggatcatttatgtagtggcagggatagagcgctcttgagtttgccccaagttttcaaaagttccaaggacaagggcaatcttctcgctcgtcaaggacaaggttctattgaagccccaggtaaagctgagagaattgcaagacaaagagcaggaggtatccgtagtgtcgaagatgacgtcgtaccagaggaacccaactttctagcaaaggttcccaaacgggagcgagatgggagagcagcttttcgtccttcaaagaagtcaaacccgtttct

SEQ ID NO: 5354 - DNA, 416 bp, Cyanidium caldarium
  Clone ID: LIB190-063-Q1-E1-C7
ggtacaggtaaggaattcccggctcgacccacgcgtacgcaaggattctcttcacgacacagaatggatacttttttaatatttgactccaccagtcaacgattcggtgtcgctgctgaacacgtttatgacgtaaacgagaataccaagttgcgttttggtgggaaagttcgtcacggagaatcggacccggcaggatatgtcattgccgaatatgactttacggtttccaaagaagattttccgataaacgttcgtgcacgtgcgatatgtaaaagtaaccagtgcatcggcgatattcgtgccaaaaagaagtttgaagtggacgaagacacttctttattcttcttggccaaagcttgtactcaggaactaacaaaaggaagttatattattggtaaagctggagtgacacg

SEQ ID NO: 5355 - DNA, 431 bp, Cyanidium caldarium
  Clone ID: LIB190-063-Q1-E1-C8
ggtaccaggttaggaattcccggctcgacccacgcgtacgggctcatgagattgtccaagcactccaagtttctccccagttgcgttctcaagcagtcgatcaagtacgcaagttgtatcagtttttcgatgaaagagacgtgacaatgttggaaatcaatcctttggtagaaaccaaggacaatcgtttggtttgtgtggatacaaaaataagtttcgataagaatgccgagtttcgacaatccgatatatttgcaatgagagataccacacaagaggatcctcgagaagtaagagcagatcaagttggattgaattatatcggattggatggaaatattggatgcttagtgaatggagcaggattggcaatggcaacgatggatgtcatcaagttgcacggaggtaatcctgccaactttttggatgtc

SEQ ID NO: 5356 - DNA, 424 bp, Cyanidium caldarium
  Clone ID: LIB190-063-Q1-E1-D8
ggtacaggttaggaattcccggctcgacccacgcgtacgcggacgcgtgggctcgagcaatgaatggaagagctttgtttcctgaaacagctcgccagtataaaaatagtgaagcccactctacagtttcactctcagaccgttcaacctcgaacactcccgtcgcttctggtgatagcaactccaaattgctatcaaatgcaagtttggaaagacaagaagaagatagggttcctcctttaattgactttagtgacttggttctggagaattccgttgctgagtcagaagaaccctcatgtcccgtctcacctccacaaaaatcacttacagtggaggaggccttgaactttccacctatgcctacgagcttttcggacctacaccttaaaagtgtcttgggactaacaaatatgctggaaag

SEQ ID NO: 5357 - DNA, 284 bp, Cyanidium caldarium
  Clone ID: LIB190-063-Q1-E1-E10
gggtcgaggcacgcgtacgaagaacaggaatctacgaataatgttcaagttggtggttccatgaatgcgagtgacttgtcacaaagtattgtcaactccattggttcacgaagaagagaagatagagaatccgacgcgaccccttctgcaagtgtttccttagataatggaaactcggtttcgaaagatatgaaagatatgggaaataaagaggtccatcgagatttttccaaaaaaaaaaataaaaaaaaagtaaaaaaaaaaagaagaaaaaaaaagaaaaa

SEQ ID NO: 5358 - DNA, 383 bp, Cyanidium caldarium
  Clone ID: LIB190-063-Q1-E1-E12
acgcgtacggccaatgcgaagtctgcctggatctcactacacgaaaagacagggttaccttggtgggcgactctggttactggtgcgtttgttattcgagccgcaacctttcctctctgttggtatggacagtaccacgctgataagttgagttcgttggctccagaactaaaccgggtcagatcatatgttagccgctcacctggaacttcactccaaaagatcagaacttgattcgtcgtctgcgacaggaactgctgaagagaagtgattcttcatctttgaaagtgattccttatgggaagttagctcacgtaccgctttttgtaaccgcggcagcttcagttagaacgctaacttttcaaaaatacccgggttttgag

SEQ ID NO: 5359 - DNA, 382 bp, Cyanidium caldarium
  Clone ID: LIB190-063-Q1-E1-E5
ggtactagtaaggaatgcccggctcgacccacacgtccgcccacgcgtccggttgtggagaatgcctttagtgaatgaatatttggagtctttgaagagtaagattgccgacttgagaaatgttggtggaagggctggtggctccattgctgcggccttgtttttaagagaattcgtgaagcagtctccttgggcgcatatagatattgcaggaactgtatggaatgagaagcagtcggcagctacaggatttggtgttcgtactttggtagaaatttgtgaaagtttttctcacgaacaataaaaagacacaagcgaggcgccctacatgtgttttttgtttctgcgcgccaaaattttgaaaaaaaacaattaacattcg

SEQ ID NO: 5360 - DNA, 383 bp, Cyanidium caldarium
  Clone ID: LIB190-063-Q1-E1-E6
aattcccggctcgacccacacgtacgcccacgcgtccgcccacgcgtccggtggagacaacaagaagaacgtgaagctgtggaggctacgagacatatgaggcaacgactgaaaaagtctgtactaaaagatgagccacctgagaacagtcctcacgtaacggagttgctattaaggctaccggatggacgaaaagttgtgaggaggtttcaagacagtgaccaactacaagtcgttgtacatttcgtggtttatgaaacgggactatcggaagatgagtttcaattgattgttccctatccccgaaagggtttaaccaacatggaggctacactcgcagaccatagccttattaccaaggctgcgttgataatacaacgtaa

SEQ ID NO: 5361 - DNA, 424 bp, Cyanidium caldarium
  Clone ID: LIB190-063-Q1-E1-E7
ggtaccagtcaggaattcccggctcgacccacgcgtacgcggacgcgtgggcggacgcgtgggcctgatcgtatgatgggaacctattccgtattgccttctcctaaagtatcggatactgttgtggagccttacaactgcatcctttccgttcatcagctggtggaaaatggagatgaagtgttctgcatagacaatgaggcactctataatatttgccacaatacgttaaagatgaataatccatcttacagtgacctcaatcaactcgtcaccgcagtaatgtcaggtattacttgctcacttcgcttcccaggtcagttgaatgcagacttgagaaaacttgcaaccaatttgattccattcccccgccttcatttcttcatgattggatttgctcctcttgcagctccaggaactcaac

SEQ ID NO: 5362 - DNA, 195 bp, Cyanidium caldarium
  Clone ID: LIB190-063-Q1-E1-E8
cgacccacgcgtacgcccacgcgtccgcccacgcgtccgcggacgcgtgggcggacgcgtgggtggtttcttgtggcgtgtgtgggtgacgttgttagtgacgaccgtgtcagagacgacgtgtccgtgcatcattcgactagttgccatacggcgagtatgctgtccaggacatatcggatagagttgcatgtt

SEQ ID NO: 5363 - DNA, 386 bp, Cyanidium caldarium
  Clone ID: LIB190-063-Q1-E1-F10
cgcgtcagcccaagcgtccgtaagaatgtaattggagcccgaagagcgtcttggaggattatttcttcgattgagcagaaggaagagtcaaagggcaatcaaacccacgtgttgatcaatagagaatatcggaagaaaatagagaacgagttgagctctatttgtaaagatattctttccatattggaggataatttgattccttcccccaagtctggtgaaagcaaagtggttttaccttaaaatgaagggcgactattatcgttatctcgcagagtttacgaatcaggaagatcggaaagcatcggctgaagcatctctggaagcttacaaggcagcaagtgagatagcttccaccgaattggctccaacgcaccccatccgac

SEQ ID NO: 5364 - DNA, 420 bp, Cyanidium caldarium
  Clone ID: LIB190-063-Q1-E1-F5
ggtacaggtcaggaattcccggctcgacccacgcgtacgatgattatgggtaagtcatcgtcttcgatggtaggacgtaaaaaggagagtcgacaagaacaatcgaattcttttttgtttcgaaaccaactggatcgcaagcaacgtaaacaacaattggcagaaatgctacgtaaacaaatggaacaactaagtatgcgtttgcggtcaaaacagcaaccacaagaagaagaagaagaagaagaaagcaattgcagcaacagcgcttcttgaagaattttcttggtgcgttggacgtttgtccaaatggcctttttgagtgaagttttgttacgaacaagaatagcaccgagttggcagagaaaaagatattgtttctcctgtcgttcacatcataaagccaaacggtatacgtttcat

SEQ ID NO: 5365 - DNA, 262 bp, Cyanidium caldarium
  Clone ID: LIB190-063-Q1-E1-F6
acggtgaactctgggcaggtaactgcgagtgcacgggtggacctcatagttggcagtagttgcacagagtatgagctatacagacatgaggatgtggaacacacatgctgagatcaatggcaataactgtggaacatcctcgttccatatggtatacacatgaaccttcgatgattccacacttgcgacgttgtggttgtgcatgtatatggacgatttacggctcgttgtggttgtcagtcatcaaagacctgagtcgcta

SEQ ID NO: 5366 - DNA, 412 bp, Cyanidium caldarium
  Clone ID: LIB190-063-Q1-E1-G2
cccggctcgacccacgcgtacgggcagagataaccctcgaagaaggactccctcacgagactgtgacatcttcacaagagacaaaagatgaaggcccggaaacaaagccaaaccgctttgcaattactggccacacagaggaggaaatggatacagagctaagcaagcttgatgacgagaacaaccggctgcacaagaaaagattacttacttccacggtctttggtaaccctaaacattttatatgggtccttgcatcgtttgcgagcatgggaggaattctgtatggtattgaccagtctttgataagtggtgctggtatttatatgccagttgacctacacattgaccagaatagagaagacatggttactggatttatgccacccggtggagtatttggggctttaat

SEQ ID NO: 5367 - DNA, 386 bp, Cyanidium caldarium
  Clone ID: LIB190-063-Q1-E1-G8
ggtactagtcaggaagcccggctcgacccacacgtacgagacggaaaacgatgttcagaataccttatatagtctatttcaaagaatggatcaattggaacaagaaaactcgcggttgcggaacaatctgagtcatttagtctctacgattcccaacccgaaaagtatccggtaacgagatgacaggagtgaaagggttgtgtgtatcgccaaaaaaagtgtaaatgattccacaacactggacactttgaatggttcctatctaccaagtagatatctgaatatcatggatgtttcaaatggaaatagaagtgtgtgtaactttgtgtttttgaacacaaagatatcaactgtggcaactaaaagtattttcgttatttctgtac

SEQ ID NO: 5368 - DNA, 125 bp, Cyanidium caldarium
  Clone ID: LIB190-063-Q1-E1-G9
ccacgcgtccgcccacgcgtccggactagttcttcaatgcctgcggagcttttttgggaaaaaaaaaaaaaaaaaaaaaaaaaaaaaaaaaaaaaaaaaaaaaaaaaaaaaaaaggcggacgaac

SEQ ID NO: 5369 - DNA, 351 bp, Cyanidium caldarium
  Clone ID: LIB190-063-Q1-E1-H3
gggctcctaccatgaaatgggctttggtggttgcaggcctgtccgatatgaagcgcccccctgagaaactttccgtacctcaaaacctagctttggcttgtactggagttatctgggttcgatatagttttgtaataacaccagtaaactataacttggcactggtcaatacctttgttggtgctaccggtatttatcagatttggagaaaagtgaaccacacctatttccaacaaaaacaagtttctgctaattgattcgctatgagacgtgatggagtgagatatcgaacaacttttggtgtgtgaaatccagtgaaaatgaaagagttggtgttttttccacaataaa

SEQ ID NO: 5370 - DNA, 293 bp, Cyanidium caldarium
  unsure at all n locations
  Clone ID: LIB190-063-Q1-E1-H4
aaccgacccctggggaacggaaaacgcaagcaattattagaaacaagcaacgccgggcaacgaataatttgcccctaacaactaagaaggaaatcactacaaccaacgaaaattccttctccccctcctatccaatacttaatattcgtacattacaatttgcaccatcaacgtcnttttctacgaccggatgacctaaaacaaggcgttctacttcatccacatcctctttggaaccgataaataaaggaacacacatttccaacgacctagtcacacacacacaananana

SEQ ID NO: 5371 - DNA, 421 bp, Cyanidium caldarium
  Clone ID: LIB190-063-Q1-E1-H5
ggtactagtcaggaattcccggctcgacccacgagtccggttttgtgtggttggctcctgttcttcattggaaagatatattctattagatactattctttatgttgttatttggctgtttggttgcttgtccatccattttgcctagacacctgtgttatcgttgctctcctcgaataaagagcaacgttgttggtcgtttcaagaaacgccatcctatttcaccatttccagcgatgactttatggcaaaactggacttggctcgtggtttccagtacatctccttatactcctatatattccgtggtatttccgttatccacgataccttatgttttatttctcaggggtttgtggaaaaaaaagtcagttcctgtagtagcaaaaataaggttttcttatttgcctgttttcgtgct

SEQ ID NO: 5372 - DNA, 364 bp, Cyanidium caldarium
  Clone ID: LIB190-063-Q1-E1-H6
ctcttaactacggtacaggtattgggggtttggtgaaagtattgccaaagggaaagagtcacttacgttcatgggtacacgtaaagctcgtgatgggggcttgccttttgcaacctctccaaagaacctgggagtatcacttccaacaaatatggagcgaaatggaaagcgacaggaaactgtgtttcggtctgcgaatagaaacgaacagaaaacggaaagcgtcaagaaggaaagtacccctctagctgctatgtttggtgatgactcttcggaaacagttgaggaaacatctgtgggaaatgggctcaatagaactgctaaagaacgaaaatctggagattcttcttggtttggggataac

SEQ ID NO: 5373 - DNA, 436 bp, Cyanidium caldarium
  Clone ID: LIB190-063-Q1-E1-H7
ggtactagtcaggaattcccggctcgacccacgagtcagccgagcagctgctcctcagagatggtatgaggaacaatgcacctcatactgctgggttccagtacagacctatgaaacttatcaatgttctcaagagaagaagaaggagtacagctatccttgtcaaacttatgagcaggtttcaactacttaccagtgtggtcagtacgagtcccaacaagtttactaccaatgccaaaagtataaggaggttactcagcaagaatgccagtacgtccaagagtcgtattgtgtcgagtatgaagaatgtcagcaagttacccaggaagtttctccttcagaaattgtctactacggtgaatcttcttctagcagtagttactactactagaacacttgtgaaatgcgcaaagtcgcaaagtaaagtgttcctttt

SEQ ID NO: 5374 - DNA, 388 bp, Cyanidium caldarium
  Clone ID: LIB190-064-Q1-E1-A10
attccggctcgacccacgcgtaagccacgcgtccgatttgcatctttttggactttggatttgcacgtgtgggtgtgctcagtcagaactgcttctcagttagttacgcaatatgcctagtcataaggaacaaaataaaggaattaaaatatcagctgacggttacgcactaaagttgagcggtattcggttggacgtagacggcagtttggtcactatggtggacgcagacgacctcagaagccctcatgtttaaggaaagcctcaaggaaaagtcaaagctgcatgacccaaaatttttcaaaagctattatgaggagaataaggactacttttattatatgactcatacggagaagaaaatgtttctttctctggaagttgcacg

SEQ ID NO: 5375 - DNA, 349 bp, Cyanidium caldarium
  Clone ID: LIB190-064-Q1-E1-A11
ctcgacccacgcgtacgggacaaggaaaacaatccattaaagaatgctccacatactgcagatgtggtatcatcggataattggagtcgtccctattctcgtcagttggcagcatatcctgcagaatggtctcgtgcattcaaattctggcctagtgtaagtagaatagacgatgcttacggtgataagaatttggtttgtacctgtcctcctatggaaagttatatggaagcagaacaagcgagtggcttgaacttgttggaaaacgaataaacaaacagggattttcgatgtctattggactggaaaaaaatgacaatgaaagagaaaaaactggtacaagaacaac

SEQ ID NO: 5376 - DNA, 428 bp, Cyanidium caldarium
  Clone ID: LIB190-064-Q1-E1-A12
gtaacggtaaggaatctccggctcgacccacgcgtaagcccacgcgtccggttcgaaggacgatgcgaaatttcggaaatttggcagctgtctatttgcatcccgaagttattattgcctgtttgttggttttatcgctatctactcttttattagctatgattgcgtttttgagaggttttcatgacgtcaagaatactgcagttcctggaactattacggcaggaattggtccacatattgcgagtacggcactcgattgcttttccgtttttgtccaagagaagcgcgagtcaagtcgtgtcgcctggccactggtgtcttgtatcttgttggatagaaaaactttacaattcttccgttgtactagtgttgagaaaattttggtattgattgcatatagttgaaagattcgtatatgtgtgtat

SEQ ID NO: 5377 - DNA, 298 bp, Cyanidium caldarium
  Clone ID: LIB190-064-Q1-E1-B10
attccggctcgacccacgcgtaaggtgggagtattggctgatgacgtggaccctatggtatccgtaatgaaagtcgataaggctccattggaaagttatgcagatattggagggttggagaaacaaatacaagaaattaaagaatgcagtagaacttccattgacacatcccgaactatatgaagatataggaataaaccctcacaagggtgtcatattatatggagaaacatgtactggaaaagaccttattggccagagcagtggcaaatagcacatccgctacttttcctcgtgt

SEQ ID NO: 5378 - DNA, 435 bp, Cyanidium caldarium
  Clone ID: LIB190-064-Q1-E1-B11
aattcccggctcgacccacgcgtacggagaaaaaggtaagaaagaggaccgaatcagggtaagaggtagaggagcaagaagagaagagagaatgctgggtggagtagcgaaacaagagaagggaagtaaaaggtaagaaagaggaaaggtttacgagagaaggaagtagaaagaagagagtgtaaggcggcgtcataatagaaatccgaaaggagtagaagaaaagagagagaagaaagaaaagaagagtaaaagccgtactgaagaccgacacaagaacatgaggaagaaagaggcaaatacgggaaagcagtaaaagaagaaagagaaagaaaaaaactgagtatcaggaagaaaagagggagtagatgaggaaagaaagatcaaggaagtaagagtaagagaaagagtaatgtgaatgaaagcaggaaagta

SEQ ID NO: 5379 - DNA, 220 bp, Cyanidium caldarium
  Clone ID: LIB190-064-Q1-E1-B12
gtcgaaaaacaacatttattgtggtccatgaaagcagaaactttgtctgttctcaggccaaaaggcaaactatcatactatcttaaccctcatacgaataataatatggagttggacaaatcgagcatatactcttacacatttgggtataggtacaataaggcgtttggtgtcggggttggggatggagtctcataatagtaataatatgtcggagtct

SEQ ID NO: 5380 - DNA, 430 bp, Cyanidium caldarium
  Clone ID: LIB190-064-Q1-E1-B5
aattcccggctcgacccacgcgtacggttgacctctgcttaccatctttttttgggtgtctttcgtgtgttttgccttgtcaaagcttgaagaccatttatttgctgctatgttttagagggttcgtcagagagttttgtactagtagtattccatgcttcgtggtggttgattggctctttttacaacagggttgtcaatttactgccaatctccacagcatcaactgcctacttgggtccgcatgtatacatatatttgtacagattcgtggtagacagaagagtgcagatggttcagaagtgacagcagacggttagtatacctgtagaggaagcacttgaaaaggggtcacgcccgttgtaaagttctacctgtaagtagttgtttttgcttgtagagaatgcaagtttagtgtacccgacaatat

SEQ ID NO: 5381 - DNA, 401 bp, Cyanidium caldarium
  Clone ID: LIB190-064-Q1-E1-B9
aattcccggctcgacccacgcgtacgcccacgcgtccgcccacgcgtccgcccacgcgtccgcccacgcgtccgcccacgcgtccgcaggaaaagaagaaagagaaaggaaaaaactgagtatcaggaagaaaagagggagtagatgaggaaagaaagatcaaggaagtaagagtaagagaaggagtaatgtgaatgaaagcacgaaagtatttgaagaagagagtgtaaagcgcgtaccttttgcataaatgtcccagcgagtgaaagaggaagcaaaaagaaagaaaaagaagtagccaggtaagacccgaagctagttgatcttatgctgtccaagcgaagtaaggctgaaccagtatctgtggaaaaagatttggaagagatggcataaagggtgaa

SEQ ID NO: 5382 - DNA, 368 bp, Cyanidium caldarium
  Clone ID: LIB190-064-Q1-E1-C10
gaattcccggctcgacccacgcgtacggtactagttgcggttgacgtggggtagtggtcaaccaagagtccttgggacacaaactatgtccacaacttcataagtttgtaaagtttgagtacttgcaatgagctatctagtaggaaataccgaacaagacttacaagccaagaaaccaacatatgaagaactggtggccgaactatctcaactcaaggcggatttattcgcagaaagacacaataagaaaggtagttgaacaagagttgaaagagttgaaacagttgtcgttttctatgcaaactcatatcgaggcagaagaggagtatattgccaataaactcaataaaccgctcacagagttgaaa

SEQ ID NO: 5383 - DNA, 413 bp, Cyanidium caldarium
  unsure at all n locations
  Clone ID: LIB190-064-Q1-E1-C11
aattcncggcctcgacccacgcgtaaggaacatttggatgactttcgtttggaagctatcttgggagcactattgtgtacttgttattgtgagtggaagcgttttgaaggagaattgggggtacaagaatggaatgaattggagaagatatcttccttagatacttggaagcttgtgcttggtacaagacaaagagtggataatatgttacagcgagtacacaagctgacgagcatcttgtcctttttatactcgggcgaacaaccgagagtggactatatcgttgctgaggatgaagcaagttgggaaaagttgtggagaggaaaacgcgaggtcattggatatactttggaagcagctttacagaaaacttgtattgtggaaaaccagttgagggagtggaaaaagaaact

SEQ ID NO: 5384 - DNA, 346 bp, Cyanidium caldarium
  Clone ID: LIB190-064-Q1-E1-C2
gggtcgagccacgcgtccgagcacaactggcggttcacgaatgtttcgctcaaggagtactccagatatttatcgatggcgtcctgtatctgttactcattcagctgaccacaaagatggccttaaggattctttgataaccaatcaaatctttcgaatttcagaaacttatcgtaacaaggacgacatgctgaaagttgaagttacaccccacactggcctaccaggtggaaagcaaggacctcgtgcctctccttgttcagctatggagaatgtgatgaacaataataatgactggacttgttctgctgggaatgcttcattcgagaggcagagtgtctagttg

SEQ ID NO: 5385 - DNA, 447 bp, Cyanidium caldarium
  Clone ID: LIB190-064-Q1-E1-C5
attcccggctcgacccaagcgtccgaaacaactcgggataacgagagatagaatggacattcttgctgctcgtgaagaaatactgttgcagcaagtacaagaaagattccagagattacaaagttacacgactcaagtatccgcatattatgaaaagctaaaatttccaatggaagagtatgaggagtttgcttctcaacactcaaatctctctctttcctgcttgcatgcttgggaacgggaacttggtcgtttagaacaacttgaaaaggacagactacaacagctcttggatgagagcaaacaaaagttgcatgccttgtggaatgaacttcaaattcctgtttcagaacgcttgcattggcaagaaacccttgatgaggaacatttgtctacaggaagacttgataggaagacatgaccaagacatcagtagactggaatcct

SEQ ID NO: 5386 - DNA, 357 bp, Cyanidium caldarium
  Clone ID: LIB190-064-Q1-E1-C6
aattcccgggccgacccacgcgtcaggtggtggtggtggagacgcgtttcaatctcccacgagcctttctacaattgtctttgttgtggtgtttaatatgttgggtttcgtgcacctcgtgagtccaaacaagatatcttcaaaagggagctttgtaacatgccctgttctatccaagaaacgagtatccccgtctaagagagcaactattgtggcttcttcttttggtatgaacggttccaaaatgggatctctgggcggtgtcaagtacaaaaacgctggcgtagcaaacgatggtcgttgtttcaaaataacctattgtcaaccaagtcagtcgagaggttacagcgggaagga

SEQ ID NO: 5387 - DNA, 386 bp, Cyanidium caldarium
  Clone ID: LIB190-064-Q1-E1-C9
aattcccggctcgacccacgcgtacgacccgctgaacttacgcatatcattaagcggaggaaaagaaatccggcaaagaacagaaaaaggtaagaaagaggaccgaatcagggtaagaggtagaggagcaggaagagaagagagaatgctgggtggagtagcgaaacaagagaagggaagtaaaaggtaagaaagaggaaaggtttacgagagaatgaagtccaaagaagagagtgtaaggcggcgtcaataatagacatccgaatggagtagaagaaaagagagacaagaaagaatagaagagaaaagccgtactgaagaccgacacaggtactcgaggagaaaggagacccaaattaaggtgagagaatggacgataaggaact

SEQ ID NO: 5388 - DNA, 407 bp, Cyanidium caldarium
  Clone ID: LIB190-064-Q1-E1-D10
attcccggcctcgacccacgcgtaagcccacgcgtccgatcatttttgttcccggcaaagagcaacttcaatatggatgcaatgtgttgaatttaggcaacaaaaatattgtcgcggtacacccgacaactgcccgtagaattgccaaggcgccttgtttcgatggaaatgtagaatatatcaatatgtctgcaatcactgcgatgtatggagcagcacattgtgcatctcaagtcgtctatctgacaacatgtccacgatattctcactgacgacgacgacgacgaagcaaagtgggttcgatggcaaaacgagatatgcggttcacctaggagaagacaacaagtgcctactgctttggaaaatggatgtactggttgttgtcgccatcatcgcaaccattagta

SEQ ID NO: 5389 - DNA, 410 bp, Cyanidium caldarium
  Clone ID: LIB190-064-Q1-E1-D12
gaattcccggctcgacccacgcgtaagagaaaggaagacacagtaaatgaggcgagaaagcataggaagtgaaacggattaggaacccgtgtagtctatgcagtaaaagaaagaatgagtaagaaaaaagggagtcattccaccaggggagtaaaggcgcaagaaagaaacccaaagcaattgacgggaatcggaaaaaggggtggatcacgtaaattaatccgatataaaccgagaaccttaccctctccaagaaggtgttgcacggctgtcgaaagaacgtgctgtgaagtgagagaacgtacgagaaagccaagtgaggaaaagaaggcaagtagagggcggcccgagaaaggagagggcgtaagacgtgatacagagtaagaacatgaggaagaaagaggcaaata

SEQ ID NO: 5390 - DNA, 411 bp, Cyanidium caldarium
  Clone ID: LIB190-064-Q1-E1-E10
attcccggctcgacccacgcgtaagcacgaaatggacgcttagtgacgataaaagacttgtttgtagtgtcggtttgtacaatgaaaactggcctcttatcgcaagagttcttaaatattggtcttattcagaatgtgagaggcgttatcgaacgttgcaacgggaaaataggctgcttcctttagaaagaacggtaatgaaggaagttcgcaaaggaaaatcaagcgaattgctatcttccatgtactattcgtcacgatgaatatggattggcaagagagcgatgttcatcggctttacaagaagtattttttggttaataactgtgtacatacagaagatgacgagtattcgcaagtgcagcaagtaatctgatatccttagtagttgtagttgggagtgacactttt

SEQ ID NO: 5391 - DNA, 355 bp, Cyanidium caldarium
  Clone ID: LIB190-064-Q1-E1-E6
gaggtcccggctcgacccacgcgtacggagagagaggggatgagtaccccagccagacgaagattgataagagactttaagaaactacaacaagtaggttatttctttttttctacgtttctaatagcagaactgtttttgtgttgttcatacgaccctcctagtggttgtagtggtgctccttgtgagaatgatattatgcgttggaatgcagtcatcctatgcccagaagatagtatctgggaaggtggcacgtttaaactaacttttcagttcaccgaggactaccgtaggaaaccgcctacggtcaagtttgtgtccaaaatgtaccatcccaatatttactcggatggaa

SEQ ID NO: 5392 - DNA, 400 bp, Cyanidium caldarium
  Clone ID: LIB190-064-Q1-E1-E9
gacccacgcgtaagcccacgcgtccggagaagcgtatatcagaaagtcagaaacaggaaggtcaagcagatgatacaaaggcggcattggatgacgagaaagaaattctgaaggaaatagaactagagatagccgattttgattctgtgatatcaaaccaagagaaggagaacagtgatggcatgaaaggtgatccagtaacgcaagtgacacgggtggaacctcgaaaacgagccagacaccaaaatagaactctccaaggaacaggaaaccgctttacatgaaacgtttgatgacgcaaaccatgaaatggttcctaacaagaagagcaggacctgcaaagtgaatgaagaccatccttctacgcaacagtaaccacttaaagagaactttacgatac

SEQ ID NO: 5393 - DNA, 391 bp, Cyanidium caldarium
  Clone ID: LIB190-064-Q1-E1-F12
tcccggctcgacccacgcgtacgagagagagaagaaagaaaagaagagaaaagccgtactgaagaccgacacaggtactcgaggagaaaggagacccaaattaaggtgagagaatggacgataaggaactaggcaaaaggatatggtatctgcggtagaacatatgaaagaagcagcaccgactgtttagcaaaaacacagcactctgcagaaaagagaaaatgtaaagtatagagtgtgcggctctgccaaatagtagagaagaaatcgatgaaagtgaaagcgagtaaaagatgaggtatagagaatggcggtcctaacagtaaggatccaaaggtagcgaagtaaatagacgtttgaaaggcgtccagtatgaaaggagaaacgagtg

SEQ ID NO: 5394 - DNA, 409 bp, Cyanidium caldarium
  Clone ID: LIB190-064-Q1-E1-F9
gacccacgcgtaagatggaaaatgggtattgtagaggagtttgctgaagcatggttgaatactagtgtacatagaagaagaaggaagcagctacttgtgacgtcgacaaccgaacttccttatattctcctttcacctgcggaaataaacaaacaagaaacttctgttcgaaggggaactttaagtgtagagaaaccacagataattgtcccgggacacaaacaaaatattgcaaaattttacgaaacttgatgatgagcggtttgaggatatacgtaattctctgatattagctcgttttgtaaagtttccatctggcagatatcggaaccgttcttaccagttggacattgtggatagcccagtagaagcacttgctgagaagtggaacgaacagttgggaaaagaa

SEQ ID NO: 5395 - DNA, 213 bp, Cyanidium caldarium
  Clone ID: LIB190-064-Q1-E1-G11
gacccaagcgtccgcctttagaatgttatccagagcttcaattgccgcataactttttgcaccacaagcaaaacacaagtcgcgctctttttttgggaataccctttggaagggaaccaattcctggtccgaatccgtttcctggtcccaacaatcctggcttttcaagttgcaaggcgttgcttggtccttgaaaattgtggattccggttt

SEQ ID NO: 5396 - DNA, 347 bp, Cyanidium caldarium
  Clone ID: LIB190-064-Q1-E1-G2
cacgcgtcagcccacgcgtccggaatgactccaccaatgatgcgatgaagattgtctacagcagctcatgatctctattttgttagagtttcctcgtcctattgacatacagcaagtcagtgaatggttgatgtctttaggagcttgtgctgttgaagtttctgagagagatgcgggagaagaggctgcttggtctgccatagccagtgcacatcagcaacatctacagcagttgggaagcaacactgcttggaacagcagcagaacatttcgggttttgcgttcttcagacgtgtctccagagaattttctgatggatgttgcttccgtttccgagtggaattcag

SEQ ID NO: 5397 - DNA, 229 bp, Cyanidium caldarium
  Clone ID: LIB190-064-Q1-E1-G6
ggctcgacccacacgtcagcgcaagcgtcggctcgacgtataatttggaatatcacagaatgtttctcaggtttgtaacaggcactctacgactacctgttggaaggttcccacctttgagtcgtcgttggacgatagctaagcgaactccagatgcaggtcaatgtccagataattgtctaactactgtgaagacctgtaccaattagctgaaacttccgcaatactc

SEQ ID NO: 5398 - DNA, 335 bp, Cyanidium caldarium
  Clone ID: LIB190-064-Q1-E1-G7
gacccacacgtcagaggcaaggagaaattggagtcatcaaagttcatgagaaaaatccagaaatggcttatactattgttcgcccaggacacctgataaatgagcctgccaaagggcccaagtcagtaatagttgatcaaggtgatcgcattagttggagggttactagagcggacgtagcgaaagtatgctgtgcttgtttaaaagtcgaaaatacgatgaatgcgacgttcgaaatagctgggaggaaggaaacagaatcgcagtccaatcttcccgaaacttatgaggcgctgttagctactgtaaagccggataagaaacctgagtctact

SEQ ID NO: 5399 - DNA, 414 bp, Cyanidium caldarium
  Clone ID: LIB190-064-Q1-E1-G8
tcagcgaaacagcaataactgtgaaaatgcagtaaactagcagtaggacggaaagaccccataattcttgactagataggtttagggaggagagagaatcatgaagtagaggaggtggggtaagagatgaaagaccactgcatgaggataaggaatctaactgagtaaggaaaataagcttaagctagtttggctggggaagtaaagcctaagaaagagtaaattaggcaagcaaaggcatgagagaagtataatagcagaagcatgcttgaagagagagaaagagatttcagaaagggaagaaaagtcagctatagagaacaggtgaaggacaactcaagaagaggagagcaccgaacgatcgaagaagaaagcttgggggtaacacgttaatgtggtgttagagaacgtatc

SEQ ID NO: 5400 - DNA, 390 bp, Cyanidium caldarium
  Clone ID: LIB190-064-Q1-E1-H10
aggtcaaatggaaagcatatttttacaaaacttttcacaaaaccaggctttagctcctatgtgcttgcattcagccttccacgactgttggaacggttgtaacggagcgttgtttttaccagaggaaatagacagacccgagaacgcaggtttacctccactgaaaccatatctgatgccttttactagccagtttccctgtataagtatagcagatctgataaacctcatgtgctgtaacagccttgaagtttcttgggggacctgatgtaccggtatattatggacgtttggacaggggtgttcctgatccctctggtcttattcctgaaccaactatgagtttgtctgctcttatcaattctttcaacgctattgggtttagcaaag

SEQ ID NO: 5401 - DNA, 333 bp, Cyanidium caldarium
  Clone ID: LIB190-064-Q1-E1-H3
cacgcgtcaggtgaatttgcgcaatgttgcgtgcaatagcttccaagcttcgtggtgccaatctaacagtattcactcgttccttttgcagtgctacgtcctcatcgagttccacaagcagcggtgatcagggaagcagtttacgttcgagtgttgccagtcgctatgcatatactttattatcccttgctcgaaaagaacgtattttggagaaagtcaccaacgatgtgaagcagtttcgcacttttgagtcggatcatccggagttcaagcgcttttgacaacatcgcacagttccaaaaggcgaaaagcaacaattattgcgcgagttgt

SEQ ID NO: 5402 - DNA, 342 bp, Cyanidium caldarium
  Clone ID: LIB190-064-Q1-E1-H5
gaattcccggctcgacccaaacgtaagcgattcttctgtcgttgggctccacgatgagtgttgactcctgtgttcagttgttgataggagaacttcccggagttggtaccttgaacgtttgtttatcttcccaagaaacagttggggacttggaaaaagagatatggaaacggttgggttatcactggcctttggtatttctgtatggagggaagctggtgagtacggaagaaaggctcttgcgttttgtcaacggttcctttctacaagcaagacctttgggtgttttggaaaggagggaaaggaggttttggtacacttttgagaggtcaagctgcgttt

SEQ ID NO: 5403 - DNA, 348 bp, Cyanidium caldarium
  Clone ID: LIB190-064-Q1-E1-H7
attcccgagccgacccacgcgtcagcccacgcgtccgcggacgcgtgggttcatggcaaggaagagcgttgggctactttggggattgaggctgttctgcgtagaggaggctttaaaggacaaaacttaacactgatgcttgttggtcaagtaattttactgtctcatctacctcttgtacctttatttcgttgaatgttgttcactttggatttcaatgttttagggtgatggacgatcctagtgccctggtaaacaagagacaccaaggaaatacagttcctttcttcggttttcactttatcaaccttgactactgaggagcctatttctttggaatttgcctcc

SEQ ID NO: 5404 - DNA, 249 bp, Cyanidium caldarium
  Clone ID: LIB190-064-Q1-E1-H8
cccacgcgtccgaataaatctaaagtaaaaggtaagaaagaggaaaggtttacgagagaaggaagtagaaagaagagagtgtaaggcggcgtcataatagaaatccgaaaggagtagaagaaaagagagagaagaaagaaaagaagagaaaagccgtactgaagaccgacacaggtactcgaggagtaaggatccaaaggtagcgaagtaaatagacgtttgaaaggcgtccagtatgaaaggagaaaa

SEQ ID NO: 5405 - DNA, 372 bp, Cyanidium caldarium
  unsure at all n locations
  Clone ID: LIB190-065-Q1-E1-A8
gggtaggcttagaagcagcaaaccagagagggaaaaagcccagaagccaagataaggtatcaaagtaaagaaagaaggaaaaggagaagaagagagggtaggcttagaagcagcaaaccagagaggaaagcgttaaagcatgaaagaaaagaaatccgaaaaagatgagcataaggaggagaggagtgagtacgataaggttgagggagaggataaggaggggagaggagatagggataagttaagagaagagataaaggaagagaagggataagagaggagagaaggagaggaagggaagtaaaagagggagtaaggaatgtaagtaaggaagaagaacgaagaaggagtangaacgagagagaacgaaaa

SEQ ID NO: 5406 - DNA, 366 bp, Cyanidium caldarium
  Clone ID: LIB190-065-Q1-E1-B10
gggtcggcccacgcgtcagcccacgcgtccgctttggtgggcaccgctgctatttgtgtggaacaatgacgactagtactacaacgagacctaaattattgaaagtagtagtcctaggagatagcgggtaacggtgtaatctttcaacggatcgtttcttaatcaagtttagtgttgggaaaacttctctcttggagcgctttgtcaatcgtcgttttagtcagcagtacaaggccactattggagcggatttcctgaccaaggatatgtttgtagatgatagaaatgttaatttgcaaatatgggatacaacgggacaagaacgataccaaagcctcggtaatgcgttttatcgtggtgctgatg

SEQ ID NO: 5407 - DNA, 344 bp, Cyanidium caldarium
  unsure at all n locations
  Clone ID: LIB190-065-Q1-E1-B12
tattgtcctaaagtttgtgtttttgcgatgaataagcaaacaaagttggaaaatgttgaatacgataagaaagttgaaaacattcactactttcaccagaaccttatgtcaccaagcgttatcaaagaatattggaacgctgtcgaccctgtagtagccctcgtgatggttttcaactttacttccagcgtgagtattgtatcagtgaacaaatatgtgacccagttgggttttcgtttcatgtgtactttaacttgtatccacttcattgtcacttttttgggcttagtactttgttcttacgtgggtttattcaaaccanagaaactagacctatttgcagc

SEQ ID NO: 5408 - DNA, 339 bp, Cyanidium caldarium
  Clone ID: LIB190-065-Q1-E1-B3
ccgggtctgcccacgcgtccgcccacgcgtccgccgagcgcgtccgcccacgcgtccgggaacccaagtattgggatggaagaacgtatttgaaggcaaatatatggaatgcagtgttggaatttcaacgaaaacctggagataccgggtcggcagaagtacaaggtaagacaacaagggaaaccatgggatggatggatgtgaccacatgtgtgtgtgtgctctctctctactagttgcggtgttgaccaagagaatggaagcattggagaaacaatgcacagaaacatagatgatccgaaagcacaatatttgttggatcactttacttcgaggaga

SEQ ID NO: 5409 - DNA, 432 bp, Cyanidium caldarium
  Clone ID: LIB190-065-Q1-E1-B7
aggtaacggtcaggaattcccggctcgacccacgcgtacggtttccagtggatttatctcatcgttagttaggaatagaagattggattggataacaacacgaatatgcaaagttttattgtaggaatgcaagtttgcgatagttgttatagatggactctccaacgactgcaaaagaagacgacgaatagtattctcggtggtttgctttcgaggagaactcctagtcgtcctgttttttttcgtcaagtatttttctgtgcacaagacaatcacccaacgtatgaagagtttgccaacgtgttgagacaaggaatatttccttgggaacaagacgacgaaacccaggaacgaggtaaccctcagtgttccctgtgtcaaggagacttttatattccttgtgaaaactgtcaaggcgttgggtttttgttt

SEQ ID NO: 5410 - DNA, 409 bp, Cyanidium caldarium
  Clone ID: LIB190-065-Q1-E1-B9
gggtcgagccacgcgtcaggtcaagtccaagtccatgaaagacttgttagcttcggctcctaaaaactggggtagatgggggcctaatgatgaagttggttctcttaattttctaacgaatcaggaagtgctgagaggtattcagtcggttcgatttggtgaggtgtatacgttgggtgagttgatagccaacccaaaaggagagccggtatttcctgggagaacaggtgcactcaagtttatgacacaagataagagctactataaaagtggcaagtcgcagtctttacctggtggtggtgaatactccgatgatggcatcaccatgtacttgcaaggctccacacagtatgatgccatgggtcatttctggtatgatgatcatatctggaatggatattctgccgat

SEQ ID NO: 5411 - DNA, 381 bp, Cyanidium caldarium
  unsure at all n locations
  Clone ID: LIB190-065-Q1-E1-C12
ggtcaggaatacncgggtcgagccacgcgtccggaggattcgaggagagagagagagacagacagatggccaacgctggtcaagatggccttgtgcaagtcaacaaacatagaaaagtaaagagattgcaagaagataatattttgaatagagcactatcacaaccaggagatgtatttctgtgcttttgcaacatccagttgttggtgaatgcagaaagagctattataggaaatattacttgtccagaaagtatcgaattgtgtcgtctattagctggacatatagcagtttggttcgatgaacatttggatgactttcgtttggaagctatcttgggagcactattgtgtacttgttattgtgagtggaagcgttttg

SEQ ID NO: 5412 - DNA, 445 bp, Cyanidium caldarium
  Clone ID: LIB190-065-Q1-E1-C2
gcgtccaggtacaggttcggaattcccggctcgacccacgcgtacggtccctcgtcctcgtcgtccaacgagtaccaagacataaaatagaaaatggcaactttactatccaaaaaaagaagagcagtagccgacggtgttttcaaagcagaacttaacgagtttctgatgcgagaattgtcggaagagggatactctggtgtagaagtgaaacccacgccgttgcgaacggaaatcgtgatccgagctaccagaacacaaaacgtgttgggagaaaaaggtcgaaggattagagaactcactgcgttggtacagaagcgattccgttttcctgaaggaacagtggaactttatgcggaaaaggttgcggatagaggtttatgtgccattgcgcaagcagaaagtttgcggtacaagttgttgggtggattggctgtgcgtagag

SEQ ID NO: 5413 - DNA, 315 bp, Cyanidium caldarium
  Clone ID: LIB190-065-Q1-E1-C5
gaattcccgggtcgacccacgcgtacgcccacgcgtccgaaaaaagagagaactacagaagaagaagaagaaaccactattaccaccaccagcagtagtagtagtagtaatagtaaagagacaaagacagaaaaacgtcgagctgctttagagcgctttcggcagaagagagccaatcggtgttttcaaaagaaaattcggtacgagtgttcaaagaaggtggctgacgtacgtcctcgtatacgatgtcgttttggtaaaaaaggaagattccaaaaactttggttggaaactggtgacgcaacaatcccaact

SEQ ID NO: 5414 - DNA, 401 bp, Cyanidium caldarium
  Clone ID: LIB190-065-Q1-E1-C9
gggtcgagccacgcgtcagcccaagcgtccgaagagtcttggaacttgtccaaggaagagaagattgaaaactcgatgcgcattaaagaaaagggcaatgagttgttcaagtctggtagatataaacttgcgaagaagaagtatgaaaaagtgataagcgatttggagtttgatgtgcgtaacaagtcggacctcaatacgggacaaaagcaacaaggaaaatccattctgttgcagacatacttgaatcttgcagcttgtgaagaaaagcttggcaatccgaacggtgtattgaaacaatgtaacaagggattggagttggattccataaatgtaaaggcactgtttagaagagcctctgcatatttacgcatgtcggaagtgttgttagcagagaaaga

SEQ ID NO: 5415 - DNA, 298 bp, Cyanidium caldarium
  Clone ID: LIB190-065-Q1-E1-D10
ggtcaggaatatccgggtcgagccacgcgtcagcccacgcgtccggtttgcacgcagctgcgtatgactatcgtactttagggcttcctcttgttgctgaagaaagaaagttggaagcaattcaatcggacgtattggatgcttttatggaaatgcattttacacccgatcgaatgatattctctgctacgaatgtcgatcatcaagagattgttcagttggtagataaattcttttcgagtatgcaaccatctcctcgacaatatattcgtccaaaggcaatatataccggtggaga

SEQ ID NO: 5416 - DNA, 444 bp, Cyanidium caldarium
  Clone ID: LIB190-065-Q1-E1-D3
gtaaggtcaggaattcccgggtcgacccacgcgtacgcccactaggagataaaaaatttatccgggagcaaaaagatacaaattttgctgatatttttatgaactaagtcaggtgttttctcatgtagcgacgttgcaacaaaaaaccacgacaatccacgacgctgtggaggtctgaacgaacgagaaaatggaagatgagatggctaaggtgtggctattcaccgacgcaaataatcccaagttctggacgcgtaaatgagaatgctcagtgctgcatattagattcctggaattatacatcaaaaataattgcaacttaaattctcaaaatttacaagtattcttgcaccgacgaatactgcttgcgttagttttgcttgaagctcacccggaaagttttcgtgcggcatgaagcagtgaagataagtgaaatctttgttg

SEQ ID NO: 5417 - DNA, 402 bp, Cyanidium caldarium
  Clone ID: LIB190-065-Q1-E1-E10
ggtcaggaatatccgggtcgagccacgcgtccgcgaaattctgaagaaatgtgtaataattgtgtaacggattcttagtgaagaaagcaaggatgcaagtagaacctgaggaagaagattttttaccagaagaagaagaacaagttgaagaacattctcaaccgtcacatctggttcaagaacaaccggaaacgaccaagaacacagagaacgaagaggaatccgatgcggttgaagacgaagagattgtgcgtctacagaaacagaaggacagggagagatttgcttccttggatgaagaggaacaggaacgctacgaatattatcgtatgggagatttggataaaaacaaagtgaaaaaactggtttcgatggccaatcctgccttatctatgatgcaac

SEQ ID NO: 5418 - DNA, 426 bp, Cyanidium caldarium
  unsure at all n locations
  Clone ID: LIB190-065-Q1-E1-E11
ggtcaggaatacncgggtcgagccacgcgtcagcatttttgtcgggttgcccaccaccaaaaggagacttttataggatggaaagttctgttctttcgagtagtttgttgtgtagttcaacatagcattcactagtataattcgtataacggttctcttccttttctagtctagacccctttaaaggaatgctacactcaaagtcttctactttgaactgtgctcaagctgcttcagcaacaaccattagatcccattccaatgaaacgcagcagcaagtgcccaacacaggctcttatatttcttttcaggctcccaactcttacgaagaggcgaaaccaaaactagcagcactcgactcgagcagtgagtgggagagcgacgtacgccaagaacagaaaacccccgcgtctggttttcctggga

SEQ ID NO: 5419 - DNA, 424 bp, Cyanidium caldarium
  unsure at all n locations
  Clone ID: LIB190-065-Q1-E1-E4
aattcccgggtcgacccacgcgtacgctacttggaacaactcatcctaaagcacaatgcccacggcaatgcattgagtctaaagacgttgcgcgatggcttagatttttattttccaaacaaaagtgcagcgcttcaatttgtagagtttttgcatcgcgttgtcccagtacgcatgaaaaactccgatcatttggtttctcatgacccccacaacactacctacaaatacaaatattctttttccgcagagttgcccccagtttgtanggatgacttggtttgtttaccgaaaaaagtatccaccagtttaggcggactaggtccattggtattggtgaccaaagtatcccaaaatctttgtttcatcgattcgtggacgcttcaaaccggagaattttccggatatcaatattggnagaatc

SEQ ID NO: 5420 - DNA, 394 bp, Cyanidium caldarium
  Clone ID: LIB190-065-Q1-E1-E5
aggcaccggtcaggaaattccggctcgacccacgcgtacgcccacgcgtccgtcacaatcgagtgttatttttttgaaactattctagtgcatgcttaaagcggatgctcctgaacaatgcgacgactacagagaagactacaaggagtgtctttggcacaagaagcaggtaacttttgtttttgtaggttcggaattttgtaaacgttgattttttgtaaagctggcgcgaaaatacttggtagataaggaaatcagaagacgaaagaaactcggtctccctataccttcgggtgatgaagacgacaacgagcaacagcagtaacgattggagagttttatttttctgtagaaagggatcagctgttttcaataaaaagtttactagtctcgg

SEQ ID NO: 5421 - DNA, 408 bp, Cyanidium caldarium
  Clone ID: LIB190-065-Q1-E1-E9
ggtcaggaattaccgggccgacccacgcgtcagcggaagcgtgggtgtcgaaagaacgtgctgtgaagtgagagaacgtacgagaaagccaagtgaggaaaagaaggcaagtagagggcggcccgagaaaggagagggcgtaagacgtgatacagagtaggaagaaaagagaagagagctagaaaggaggtaaaagaagagtaaaaggactagaagaggtacggaattcacgaggaaggagcgtgaaggaaggaggaatcccaagtaatcgaggaagaaaaagcttcggtgaaagcgtgaacggattttgtacacactgcccgtcaagttctggaagtgtgctaggaataagcaggagaagtagaagagagtaggaaaagaagaaaggaagtgaagacgtaagacgtg

SEQ ID NO: 5422 - DNA, 439 bp, Cyanidium caldarium
  Clone ID: LIB190-065-Q1-E1-F2
aggtacacggttcggaattcccggctcgacccacgcgtacggctattgcaagatgtcaactggatattacgaaagacccgcacccaattctccacaaaggatggcgaccaagccttgcaaaccctactcagcaaggtcgtttttccagtcctcttggctttgaaaaatctggctcggtctcacggcatgcactggtcgacgtgtcagtcggtactcaagtcgttgattctatcgtacaaagtgctccatcaagtattctccatacagttgcattgcttgaccaccacctcttctaccatcaccatccaactggccaactttgtatggacagaatacacaccggtggtctacttgtttatcccttttatgaacccatacgaaaccaaccaccgtgcaaaacccaaggctgccaaagaatcgcgatggattccccaattga

SEQ ID NO: 5423 - DNA, 451 bp, Cyanidium caldarium
  Clone ID: LIB190-065-Q1-E1-F4
gtaacggtacggaattcccggctcgacccacgcgtacgtgctatgattttacgctttgattggcggaacccgagaaacgagagtgatgaggagattaaaatgccttattttaaaacggtggtagctgcatatgtatttggactggcgcttacttttttggcggttgacgtttttcatgcagctcagccggcactattgtatctggttccatgttgtcttggatccgtaacttgtctgtcttttattcgagctgaatttaaacagttggtgaaatacgatgagtccaaggacgaaaaaactaaaaattagtggtcataaaaaatattcgcttccacaggtttgtgcttgcttcaagagttgacgagtatcaagcccacagcttttagctatttcaactattttgctgtactctagttcgtgaagcgaagaaagcacggtacaatcaagcatc

SEQ ID NO: 5424 - DNA, 269 bp, Cyanidium caldarium
  unsure at all n locations
  Clone ID: LIB190-065-Q1-E1-G1
gaattcncggctcgacccacacgtacgcccacgcgtccgcccacgcgtccgacaaagtctgtcaagaacagagaaagagaatgacaattcagatatcaactcgtcgtaaacaccgtttcaagaaacctgttccaaaaacgacagctccacggacaaaacaggtaacaaactgacaagggaacttgtcgcaatttgcatccatacacattcaaagagaactccccaagaaaaacttggattttgaaaagttcccctccatgaacttaaat

SEQ ID NO: 5425 - DNA, 388 bp, Cyanidium caldarium
  Clone ID: LIB190-065-Q1-E1-G10
ggtcaggaatatccgggtcgagccacgcgtcagggcagttaggcaatgtttgcttattttcatatgtctttcggctctgttaggttcaactttggctgcttctggtgcaacttctatttactcgttgcttcagagtaaaagagactatacttttacagtgcaaagcatagagctggctaatctaacagacgtatacaacagcagtgtattgggctttacctttcttgcttccaatgacactgcttggaaacaatcaagagccaatgtcactggtgcacttagtgcagcaaaacaaaacgtaacaggagcaatagcgtttctagaacgcttgatagcagcaagcacagtgaataaaacggtggagtttagtaagctctctagtggtacg

SEQ ID NO: 5426 - DNA, 413 bp, Cyanidium caldarium
  unsure at all n locations
  Clone ID: LIB190-065-Q1-E1-G11
ggtcaggaatatccgggtcggcccacgcgtccgggaagaacatgaaagcagaaatggcagcgagagaagcagcagcagcacaacaagcgagattagcagagtgggaagaatggagtggagaaggaagaggagacactagtccaagttcggatccattaacttttaccaaactttatgtgggttctattcacttttctattagtgaagaagatttacgcactatttttgagccttttggggaagtcgtttccttgcagcttcacaaggaccctgaaacgggacgttcacgaggttttggttttgttcaatacagaaaccacgaagatgcgaaaaaggcattggaacagttgaatggacttgatcttgctggtaggcctttanaggttggtttggcaactgcagagactcagaaa

SEQ ID NO: 5427 - DNA, 295 bp, Cyanidium caldarium
  Clone ID: LIB190-065-Q1-E1-G4
ggtaacgagtcaggaattcccgggattgaagttccgcaggatggcgccttctctaggcaaactttgggtttatccttcgggagtggtttttctaggtgcagctgttgttttgtatggtttgcaacacgataaattgccactagagagagtccagtttgcaaaaaccttttcaaagcccgtttcacaagcagataatcaagttgttcgagcaacaccggaagaatgcgattgtcttccgctttggcagtgtatgactagtggccaagacgactgttctcaacttgaacgtgaactg

SEQ ID NO: 5428 - DNA, 275 bp, Cyanidium caldarium
  Clone ID: LIB190-065-Q1-E1-G5
ggctcgacccacgcgtacgcccacgcgtctgcaattgtctttgttgtggtgtttaatatgttgggtttcgtgcacctcgtgagtccaaacaagatatcttcaaaagggagctttgtaacatgccctgttctatccaagaaacgagtatccccgtctaagagagcaactattgtggcttcgtcatttggtatgaacggttccaaaatgggatcacagggcggtgtcaagtgtaaattctctggcgtaccaaaaccattggcgttggttcaaaaact

SEQ ID NO: 5429 - DNA, 414 bp, Cyanidium caldarium
  Clone ID: LIB190-065-Q1-E1-H1
aggtacaggttcggaattcccggctcgacccacgcgtacggctcaacgcccacttttcttccactcaaatattggctttggtagcagacgtttccaacgctgatcaagtcaaccaagctatttcacagtttgcttccaagtttggtcggttggatattgcatgtaataatgctggaatcgtgtttagtggaacagaagacaagtatgcttctgaaaatgcttccgtggagcagtggaaaaagacattagatgtcgacttgacaggagtatttatatgttgtcaggcggaagcgaaatggatgcttccacaacattatggaaaaataatcaacactgcctccatgtcagcacatattgtgaatcatcctcaaaaacaggccgcctataatgcagctaaagcaagtgtagtacaac

SEQ ID NO: 5430 - DNA, 413 bp, Cyanidium caldarium
  Clone ID: LIB190-065-Q1-E1-H4
aggtataggtacggaattcccggctcgacccacgcgtacgtgttgggccttgtggtggtgatgccctggattgagctacgtagtggcaactccgctgtcttgaaagacataactgcaagtattgaaaagcctgacataaaatggataactaggacgaatctcagtacttgtctgaattctgcagaaggaaatgttacggttgacttgtcgcggcagtgtagcttgaaggatatattttcattgaagcttctcgacaataactttaagttggcgtgttttaatgatgccttgtttttagttttaccaggcttatcctttgttattactggtaatcgtatattctgtagacgctcggacttgaatgaaacggaagcattggagtcctgcttttcgtttatgaagatatgcccacg

SEQ ID NO: 5431 - DNA, 385 bp, Cyanidium caldarium
  Clone ID: LIB190-066-Q1-E1-A10
cgggtcgacccacgacgtccggcactgtctagtcgtccaactcagcgaaacagcaataactgtgaaaatgcagtaaactagcagtaggacggaaagaccccataattcttgactagataggtttagggaggagagagaatcatgaagtagaggaggtggggtaagagatgaaagaccactgcatgaggataaggaatctaactgagtaaggaaaataagcttaagctagtttggctggggaagtaaagcctaagaaagagtaaattaggcaagcaaaggcatgagagaagtataatagcagaagcatgcttgaagaaaaagaaagagatttcagaaagggaagaaaagtcagctatagagaacaggtgaaggagaactccaaaag

SEQ ID NO: 5432 - DNA, 403 bp, Cyanidium caldarium
  Clone ID: LIB190-066-Q1-E1-A11
gtcaggagttcccgggtcgacccaagcgtcagcccacgcgtccgcccacgcgtccgtctaatttgaactttaataccagtttcctagctgaagtgtattttcgaatgggagcgattcaagagataaaacgaaactttgctgctgcaaaagagttttatttgaaagcattgaaagagaatccgaaccacgcaaagtcgttgcaacagttgggttggattgaacatgaagaaggtcgttcagatgaaggctttaaaatattaaaacgagctgttgaagcagatcctaacgatggtcagggatggtatttgttaggaagactgcacatggcaaaaaaggaatatcgttctgcgtacgataattatcaacgtgcagtttattgcaatagtcgaaatccgcggttttg

SEQ ID NO: 5433 - DNA, 430 bp, Cyanidium caldarium
  Clone ID: LIB190-066-Q1-E1-A12
ccgggtcgacccacgacgtcagcccacgcgtccgcatttttctttgggagaaatacgacgtcttcgactcatggcacctaagaagacatcgaaagtagcacctcatcctgaagctctggttaaaaaagaaaataaggagaaacagaaagagaaaaaccctcttttcgaaagcagacccacgaactttggtattggtggagatgtataaccaaagagagatgtcactcgttttgttcgatatcgcagatatgttcgtcttcaaagacatcgagtggttcacatgtcgagactcaaggtgcgacctgcaatccaccagtttacgcataccttggatacaaacgtttccaaacagctattcagcttgttaatgacatatacatcagagtctaggttggaaaagagaatgcgcctacgtgaaatggcataagct

SEQ ID NO: 5434 - DNA, 456 bp, Cyanidium caldarium
  unsure at all n locations
  Clone ID: LIB190-066-Q1-E1-A4
cggtcaggaattcncgggccgacccacgcgtcagcccacgcgtccgccacgttgtcaaggggagcctttgtgagtcgatgttgtcggcacaaccgcaagacgaggaagaacaaccacaagaagagaatgttgtgcagaatatttacggtttaggttcttttgaatattcagacagttcttcgttcgaacgacaaaggaataaaaagcctactacttttttgggcaagtttgcaaccactgtctcagacacgtggaaacagttttcccaaggttttactgaagtttctcaaaaaaaggccctaaagtacccaagtctactatgttttggagactctttaacggaatattcccaacatatctccacttcagaaggaagaggctggggagctctgctggctaatcattattctacaaaggcagacgtcatcatacgtggctttgctggttacaatactc

SEQ ID NO: 5435 - DNA, 418 bp, Cyanidium caldarium
  Clone ID: LIB190-066-Q1-E1-A8
cccggctcgacccacacgtcagtagagcgttgcatactccttagctttatcgaaaagtgcacgtcgttcatcatttgcattcttctccttttggaataactgctgaatatgctcacccggtggaggtagtattcttaggaacggcttccattgcaggacctatgctcgttggacctcacttgttgacgctttggatatatttggggctaaggttggtacaaacggtggaagcgcacagtggatatgactttccttggagtcctcgttattggatacctttttatggaggagcagagtttcatgattatcatcacaagatatattctgggaattatgcttccagttttatttggaacgactatatgtttggaacggattatgcttatcgtttgtacaaaacaaaagggaatggatgctt

SEQ ID NO: 5436 - DNA, 446 bp, Cyanidium caldarium
  unsure at all n locations
  Clone ID: LIB190-066-Q1-E1-B10
ggtacaggtcaggaatgtcccggctcgacccacgacgtcagattggcggttacttcataatatgtgagaaaagctgctcttatgtctcaagaatatgtggatagacatcgcgtggcaatggaaggcgcttcgtcttcacaaagaaatttaacacaaggggaagcactggaacaacggacaagtgcagtttccttttcaagaactcttcacgacgcttccagtgactcggcagcaaccgaagcacaacaagacttgtcgcattctgtgactggaaacacaagtacacctagaaacttgaagacaagggaaaatagttggaatagtatcgcttcaaaggatgcggcagcgtcgaatgtcgtcgttacaggcagcaacaaaacaagtaaagaaaggaacaagaacgtctcaatcaacanacccgatagatataatactagtggaatgac

SEQ ID NO: 5437 - DNA, 408 bp, Cyanidium caldarium
  Clone ID: LIB190-066-Q1-E1-B11
ccggctcgacccaagcgtcagatgaaagaagcagcaccgactgtttagcaaaaacacagcactctgcagaaaagagaaaatgtaaagtatagagtgtgcggcctgccaaatagtagagaagaaatcgatgaaagtgaaagcgagtaaaagatgaggtatagagaatggcggtcctaacagtaaggatccaaaagtagcgaagtaaatagacgtttgaaaggcgtccagtatgaaaggagaaaccagtgtaccactgtctagtcgtccaactcagcgaaacagcaatgactgtgaaaatgcagtaaactagcagtaggactgaaagaccccataattcttgactagataggtttagggaggagagagaatcatgaagtataagacgtggggttagagatgacagaccac

SEQ ID NO: 5438 - DNA, 383 bp, Cyanidium caldarium
  Clone ID: LIB190-066-Q1-E1-B2
gacccacgcgtcagcccacgcgtccggaactatcttgctctgttgcaacatttctcgggatatgttaattggaaggtcatcggagtccacaataccgagaacaaaagataaccaacgaggtagcaatgcatccttggcaaacttatcggataccaacactcgcttcaaataaagcttaataggagttgattctgattcttcggaaaaaaagtcgaatggtggcctttctggaataaaaagaatacttcgaaactccaaaaaaaaaaaaaaaaaaaaaaaaaaaaaaaaaaaaaaaaaaaaaaaaaaaaaaaaaaacttaaaaaaaaaaaaaaataaaaaaaaaaaaaataggggggccctctaaaagattcaaccctacgtcc

SEQ ID NO: 5439 - DNA, 445 bp, Cyanidium caldarium
  Clone ID: LIB190-066-Q1-E1-B5
cccggctcgacccaagcgtcagcaacttcgccatgtatgaggcatttcaagtttcagtgtttccgtttcgaagtttaaaatcgtatagctatgccagtcgttggtcgagagccaagacttgtccgcagtcaaagcataggacttgtcttgaggttgttgcttcagtaaccatgtcaaggagaagtgtcttaaaattagcacttcttactggagcgttttggcagttttctgtttggaaagatgcagctttggcagatggtgcggtctcttttgccacaaagatcacttctcgtcgcagatacggaccgcgtattcttggtttagaacacgatatcacctgtctcgaagattatattcataatcaagagtgggacaagatacatgaactagtatcggaacgttatttgaatgcccagaataagccaagaacaggtaaattttggtc

SEQ ID NO: 5440 - DNA, 451 bp, Cyanidium caldarium
  Clone ID: LIB190-066-Q1-E1-B6
aagtcccggctcgacccacacgtcagcggacgcgtgggcggacgcgtgggtggcgttgttgaaaaagtatcacggacccacagacctttcgtcgctggttctcattgaaaaaggtcgaatgcttctgaaatccgatgccgtactacgaattgcagagttgttggacaatcagacccttcgtgttttggcagttgcaaccagagtgggatttccgaggtggttgagagattgggtatatacagaaattatatccaaatatcgacgtcaaatatttggagagaccgatgtttgtcgtctgatggaacctggatgggaacatcggttcctttgatggatatattgttttgttgtatatcagatatctctgttttggaagaatgaaggagacaacgagtgacaacatgatgttcacagttgtgattccttcatagttggttgataaaagaataat

SEQ ID NO: 5441 - DNA, 414 bp, Cyanidium caldarium
  Clone ID: LIB190-066-Q1-E1-B9
ccggctcgacccaagcgtccggaatgatgtggtaagagagagggcacttatgaggttgaagaagtacagcgacgagatagaagctctcaggagagagtacaaagaaagagaaaaagttagagaacgttatgatcactatcgtgtcaagttagagaatttagagaagaaaggaaaagatcaaccacgaattgagcgcaatcagcagaagttgaaggacgcagaagacgcttatcatgcagttactgcagagttgatacagaaaatggaaactagttggaagaaacacgttgaaatttttgctgaggcgtcgattgctttgtggcatacacaaatgcttatgattgatgagttttccaagtcctccgaggagatacggccttatgttcaagattacttgaataacttgaacacaag

SEQ ID NO: 5442 - DNA, 437 bp, Cyanidium caldarium
  Clone ID: LIB190-066-Q1-E1-C10
ggtacaggtcaggaagtccggctcgacccacacgtcaggacgtcgtctgtgttttcagtaacgatggaacaagtgtgcacatacgagaatatttcgcatcaaggtacaatagtagaagaggcaacgtcggaatcgttaagtgacgcagaaaacgagcaaggtgcgtatgagcaagaagaagcagaagaagatagccatcaccacacacatgaaggaggacacgcgcatgaacacacagcagaagagggaacaaccatacatagcaaagcggagaagatatctacaaaagctttgcagaaattgggtatacactcagtttcaggtgttacgagagtaactatcaagaagaccagaaatattctgtatgttatctcccgatccgatgtttacaagtcggccgggtcggatacgtatgttatttttggggatgcaaagat

SEQ ID NO: 5443 - DNA, 421 bp, Cyanidium caldarium
  unsure at all n locations
  Clone ID: LIB190-066-Q1-E1-C11
ccggctcgacccacacgtcagccaacaacaagcgcgagaaatggactcgtggcgttactaaaatgcaagtagaataattctaaggggccgtgtgtaaggacgaagacaaccaccaccagaaggaaatgtggaaaagcttagttacttgcagaacaatcaacaactactttctgagtaacaaaagatatctcaccacctcccacgatctgctaccagaacctatcctcactaccaccataaaagagagaattttggaactctacaaaacagaccccgagaaatggtcgaaacaagtactagcttctcgtttcaaagtttccgagcgcaccatcaagtttctcatagaaatggaccagctagctcagtcgatagtcgggtgtntggaccaagaagcaacgcaacactttcaaaaaatgtatga

SEQ ID NO: 5444 - DNA, 436 bp, Cyanidium caldarium
  unsure at all n locations
  Clone ID: LIB190-066-Q1-E1-C12
aagtcccgggtcgacccaaacgtcaggaaagaatgagtaagaaaaaagggagtcattccaccaggggagtaaaggcgcaagaaagaaacccaaagcaattgacgggaatcggaaaaaggggtggatcacgtaaattaatccgatataaaccgagaaccttacctctccaagaaggtgttgcacggctgtcgaaagaacgtgctgtgaagtgagagaacgtacgagaaagccaagtgaggaaaagaaggcaagtagagggcggcccgagaaaggagagggcgtaagacgtgatacagagtaggaagaaaagagaagagagctagaaaggaggtaaaagaagagtaaaaggactagaagaggtacggaattcacgaagaangagcgtgaaggaaggangaatcncaagtaatcgaggaagaaaaagcttcggtgaaag

SEQ ID NO: 5445 - DNA, 433 bp, Cyanidium caldarium
  unsure at all n locations
  Clone ID: LIB190-066-Q1-E1-C4
cacgcgtcagctgcatggatatgtgcatccactcaaaacctggggtagatgtaaaccaaaagaaacaacggttattgtcattcttagctagtcaggagccttgttatctatgggaagaagaagatcgtcatcaagaaccacaaatagatagtttatatatctctagtgctgggtacaaggcgatcattttaagggacaagatgttgttggttcacagtggtcccttgatggagaacaacggtggggtgatggatgagaataatagttttgcatatttcatgtcttccagtttttatatcatgtttgtacgtctttgtctagcggaatatcgaaacaagttgtccgttgaaacagctcagtggcaagcgtttcaacgcgagttggatatgcactgtgctcanatatccgctgcactcggtttgcacgacaaacg

SEQ ID NO: 5446 - DNA, 235 bp, Cyanidium caldarium
  Clone ID: LIB190-066-Q1-E1-C6
aattcccggctcgacccacacgtcaagacacgcatcagcgcacacgtcgacgcacgcgtctgcccatgcgtccggactatagaagtcttgtcaccttgtgttgctttggatagttgtactaggattcatgaacgaaaatggaaggaacaggaacttgaaaatctgacaagaatatctcaattgaaatgagatcataactaggtgttggccatagatttaaagtagtattatttgt

SEQ ID NO: 5447 - DNA, 317 bp, Cyanidium caldarium
  Clone ID: LIB190-066-Q1-E1-C7
aattccggcgtcgacccaagcgtacgccgcagcgaccccaatcactgaaatattcattgctggagtaacactgtttctagaaccaagaaacgtacaagttccgatattccgagcagacttacgttactttgagttgaaccatggaggcctctggtggtttgccggtagcgtcgatttgattatttctgctttgagttctgcgagtatatttgccaaagaggcacaagtgttttgtggtcactggaagcatctttgtaagaagcaccgttccgttattccttttgttcgtgacccttggcaagagtccatcccttttg

SEQ ID NO: 5448 - DNA, 430 bp, Cyanidium caldarium
  Clone ID: LIB190-066-Q1-E1-D11
gtcccgggtcgacccacacgtcagacgccggaagaaatgacacgtttagaaagtcactttgtggaaatgggtttgaaacaagaagatagaattccgttaaagttgaaaatgagtcaagtagagccattccgttatagagtggaagattgcttgtttaagattaccaagaatgtgctcaaggaagctcgagcgacggaaattaggagagagatattgaattccgaaaaaatgaaagaatactttgcccgtcattctttagactttgaggcgttgaaaagtgatcgacctttgaatacgcgaaccaatccacatttggcagatattccaagctatctgatgccatccgaactgcgtccactgaataagaatgtacataaaaatttgcaatcgaagcaaagcaaaaagagaaggaagacgggacgaccgttcg

SEQ ID NO: 5449 - DNA, 331 bp, Cyanidium caldarium
  Clone ID: LIB190-066-Q1-E1-D6
ggtataggtcaggaattcccggctcgacccacacgtcagaagagtcagtgtcttgccaacgtggcaatccgctgctgaatagtcggtacataaacttgagtagggaccacaactggaacataatatttggtcaaggtttcaaatattgtgtgctgtgtgtctctcacttacacaaatacatacaaattccaatgaataaaaaaaactgctgcttttccgttttgaaaaaaaaaaaaaaaaaaaaaaaaaaaaaaaaaaaaaaaaaaaaaacggcagaggctcaaaaggatacaggtctacgtatacgtgcacgcgacttcaaaacccttct

SEQ ID NO: 5450 - DNA, 404 bp, Cyanidium caldarium
  Clone ID: LIB190-066-Q1-E1-D8
aattcccggctcgacccacacgtcaggaataattttaccaacaaggaaaactttcccttgccagttgtgaataaagattgaaaatgatgtaaaaaaaaaaaaaaaaaaaaaaaaaaaaaaaaaaaaaaaaaaaaaaaaaaaaaaaaaacacaaaaaaaaaaaaaaaaaaaaaaaaaaaacaaaaaaaaaaaaaaaaacaaacaaaaaaaacaccaaaaaatcaaaaacacagaccatcaaaatggggccgcccccccagggaaccacccctcagttacccaacttaacccccttgcaccacacccacctttccccaaacagcaataccaacgaccaggtttaaaaccatccccctccccaaaacccgcgcacccccaaacgtaaaccccatgcccccaaacccc

SEQ ID NO: 5451 - DNA, 410 bp, Cyanidium caldarium
  Clone ID: LIB190-066-Q1-E1-D9
ccggctcgacccacacgtcagcccacgcgtccgcccacgcgtccgaaaaacacagcactctgcagaaaagagaaaatgtaaagtatagagtgtgcggcctgccaaatagtagagaagaaatcgatgaaagtgaaagcgagtaaaagatgaggtatagagaatggcggtcctaactgtaaggatccaaaggtagcgaagtaaatagacgtttgaaaggcgtccagtatgaaaggagaaacgagtgtagcactgtctagtcgtccaactcagcgaaacagcaataactgtgaaaatgcagtaaactagcagtaggacggaaagaccccataattcttgactagataggtttagggaggagagagaatcatgaagtagaggaagtggggtaagagatgaaagaccactgcatg

SEQ ID NO: 5452 - DNA, 355 bp, Cyanidium caldarium
  Clone ID: LIB190-066-Q1-E1-E1
gacccacgcgtcagcccacgcgtccgtatcgaagaaagtcaaaagttggtagttgccaagaagttggcaaagaagggaaagaaagtagtcattcgtgaccgaccagatattattgaagcgtgtcgacaggagtttggaaatatatttatctatcaatacaaagattcattgttggagaatcattctttagcaaataatagcaatcatacatatgacaaagtgaatccttgctcttctttttcgacaggagatgttcttcgagatgcagcacttgcaactgtggctaagagacatggtggattgctctctacgagtgaattggaaaagaaataaaggaatgttgttttcatgtttt

SEQ ID NO: 5453 - DNA, 439 bp, Cyanidium caldarium
  Clone ID: LIB190-066-Q1-E1-E11
aagtcccggctcgacccacacgtcagcccacgcgtccgcccacgcgtccgagagagttgaaccctttcgaaagcgagcttctaagtgggcgtaattgataccaaatttctggaaaagaagctcgtttttgaagtcagacaaggtaccctagttgtgttcaagtacgaaaaacaaaacatggcaatacacaagcgcacctttaaagtttcataagcttcctttggagtagctccgttttgtacaagtagccaaaaacacgtgttatactggttgttgatgtggcagtccacttgtctccaactaagataatcgcgaagagtttgttcggaaggatatacaaccacgcgaccgtcaaaggtaggcttgtaaaagtcaaacttgcctatgaaaaataaagcaaaatctcaccggaaaaaaaatttaaaaaaagggcggcccc

SEQ ID NO: 5454 - DNA, 214 bp, Cyanidium caldarium
  Clone ID: LIB190-066-Q1-E1-E12
aagtcccggctcgacccaaacgtcagtttggccaaagcaaagcacgacgaagatacgggtgacaagaagaagacggcagtagcaaaaaaataaacgaagcgagacattgaaacgctgtcgaatggttatgaaagggtgatatcgtgttgttggttcttattgggtagtttgttttttcgtatggataaaaaaaaagatagacttgtgtctgtgt

SEQ ID NO: 5455 - DNA, 305 bp, Cyanidium caldarium
  unsure at all n locations
  Clone ID: LIB190-066-Q1-E1-E2
cacgcgtcagctattataagtggatagaacagttggagcagcttganagaaataattagaaacaatagaaccggggaaaaaaattcgtaaagatatgaaactctttcgaaataaagggaagggaaaaaaaaaaaaaaaaaaaaaaaaaaaaaaaaaaaaaaaaaaaaagagaaaaaaaaagaaaaaaaaaaaaagaaaaaaaaaaaaaaaaaaaaaaaagagaaaaagaaagaaaaaaaaaaaaaagaaaagaaaaaaaaaaggggggggggcgcaaaagggtgaaaggtaaaaaagggggaaag

SEQ ID NO: 5456 - DNA, 432 bp, Cyanidium caldarium
  Clone ID: LIB190-066-Q1-E1-E4
cacgcgtcagattgaaaatcatggtagacactaagcttaaggacggtgctagtgctgctctttggacttgccgcctatttctctatacagttgtgttagcattttcagcaacaataattggacttgatggaaggaaggcagataacatatggaacgatgccctatattatcatggaaaagtggtgaacttttgtgcatattcggcttcgtctgtttttgaaggtggcgaccatggcgcatgtaaatatgtgatggctttggcttctatcagcttgattttagttttctttctttggttggcctcctttgtcgacgcattgtatccaattcttacaaagttctggtttgtggagcttggtatcaacatattccttactatgtggtggttggttggtgcaattgtggtgactgcaaagcgaacttctagtgttg

SEQ ID NO: 5457 - DNA, 435 bp, Cyanidium caldarium
  Clone ID: LIB190-066-Q1-E1-E5
ccggctcgacccaaacgtcagggcggcaaagaatgaaaactcttgttgtatgcttttgcaagtgaagagactaagcaaggacgctgttgtacctcaaagaggttcgaaacttgctgcaggttatgacatttgttcctcggaagactgtattgtaccagctcgaagtcggtactgtgttaaaactgacttggcagtggcgattccctcgggacactatggaagaatagcacccagatcaggacttgccttaaagcatggaatcgacgtaggagctggtgttatagatgatgactatcgatgaaccctcggtattatttaatttaatcattccgaaaaggatttcaatatacccaaggaaaatcaattacctcaccttacctaagagagaatatctactcccaaagttgttgaagtggataatctcgatagtactac

SEQ ID NO: 5458 - DNA, 423 bp, Cyanidium caldarium
  Clone ID: LIB190-066-Q1-E1-E9
ccggctcgacccacacgtcagcccacgcgtccgagcaagcgtgaaccgtgagggtagttcatcatggttgagacaaaacttcaagatggtgttagtgcttctctttggactgttcgtctcttcctctacacagttattttagcattctctgccactatcattggcttggatggacgtaaagcagacaacatatggaacgacagcttattctatgatgggaagtacattaacttttgtgcttattctgcctcttctgttgtagaaggaggggaccatggagcgtgtaaatatgtcatggcgttggcgtctataagtttgattctagtctttttcttgtggctttttacatttgtagatgcgttgtatcctattcttaccaagttttggtttattgaattgggtatcaacgtgtttcaaacaatg

SEQ ID NO: 5459 - DNA, 401 bp, Cyanidium caldarium
  Clone ID: LIB190-066-Q1-E1-F1
acgcgtcagcgatttttggatgacaggagatgaataagcttccacgtttacctaaagaagtagacgaactgggaacgacacaaactacagcaaaggttccattttataaagacagcgaggaagaaaatatgaacaattctagtgaggaagataataatcaagtagagaatgaacctgatagtggtcacagtgcttcgacacctatacccatatcctctcaaagtactgggaagcctttgctctcttcaaaggttgagtctttggggttttctacaacagaaggtgaaggaactcttctgagcattgtgagtcctcgggtgtttctgcccgcggataaacgggagaagaatcaagcagtttcgtttcgtcgtattcaaagtttaaacaagaacaggaaatgt

SEQ ID NO: 5460 - DNA, 401 bp, Cyanidium caldarium
  Clone ID: LIB190-066-Q1-E1-F10
aagtcccggctcgacccaaacgtcaggctgacaccaaaatagaactctccaaggaacaggaaaccgctttacatgaaacgtttgatgacgcaaaccatgaaatggttcctaacaagaagagcaggacctgcaaagtgaatgaagaccatccttctacgcaacagtaaccacttaaagagaactttacgatacagtcttaataatggtgctcgagatagattgtagccatttacctcagtggaaatactgtattgaactctttcgatatttcttcaataatatctgttgtaagcattgatcgttgttttctcttaaatgcttggagagaacatcttcgagtcatcgcacatgcactataaacagggataaaccttgaatagtgattttgtttagttttaaaa

SEQ ID NO: 5461 - DNA, 449 bp, Cyanidium caldarium
  Clone ID: LIB190-066-Q1-E1-F11
ggtataggtcaggaagtcccgggtcgacccacacgtcagcggacgcgtgggtttgttgcaagttggttggtttctggactttaaggcatctctcttctcttgttggtgtgactgttgttagatattgtgaaagatgggagtcaaagttggtattaatgggtttgggagaattggaaggctagttcttagagctgctttggagaaacagtctgtagatgtggtagctatcaacgatccctttattgatttggactatatggtctacatgttcaaatatgactctgtgcacggcgcttatccaggtacagtggtagcaaagaatggaaaacttgtcgtggatggacacgaaatggcagtgtttgccttccgtgaccctagtgagatcccttggtcctctactggagcagaatatattgtggaatcaacaggagtatttactgctgcagata

SEQ ID NO: 5462 - DNA, 430 bp, Cyanidium caldarium
  Clone ID: LIB190-066-Q1-E1-F12
ccggctcgacccacacgtcagcggacgcgtgggaaaacacaagacaacaatgtctcgtcccaagtgtttctttgatattgctatcggtggacaacctgcaggaaggattgtattcgagttgttctccgatgtcgttcctaaaaccgcggaaaatttccgtgccctgtgtaccggtgagaaagggtttgggtacaaagactccaagtttcataggatcattccccagttcatgtgccaaggtggagactttacacgcggcgatggaaccggtggcaagagtatttacggcaccaagtttgaggatgaaaacttcaagttgaagcattcggagccctttttattgtccatggccaatgcgggaccgaataccaacggaagtcagtttttcattacggtagtgaagacaccttggttggatgggaagcatgtg

SEQ ID NO: 5463 - DNA, 409 bp, Cyanidium caldarium
  Clone ID: LIB190-066-Q1-E1-F6
ccggctcgacccacacgtcagagcatgtcgactgttttagcaaaaatcgaagaagtagaagcagaaattgctagaacacagaagaacaaggcaactatgggccacttggggctcttgaaagccaagctagcaaagcttcgtcgagagttgttggcgccacccaagggtggtggcggtggaggcgaaggattcgatgtcacgaaaaccggtgatgctagaataggtcttgtatggtttccttctgtgggaaagtctacgttgctgaacaagttgacaaacacagaatcagaggttgctgcatatgaattcaccacactaacttgtatccctggtaatttatcacaagggcgccaaacttcagctacttgatttacccggaattatagaaagagcaaaggatggaaaggga

SEQ ID NO: 5464 - DNA, 435 bp, Cyanidium caldarium
  Clone ID: LIB190-066-Q1-E1-F9
ccggctcgacccacacgtcaggttatggtggaactgctgccagttggcaacaatatgctgcagccgcagcagcagccgcagcagcagcaggaatggggtactttaacgcgggttatcctacgacaggagagatgcctatgtatgccaacccaacgtcagtctatagcaatgattcggtttcccaacaagagagcgactcgaagaagagtggtcgcagcagtggaagcagtcgtagaacctctggaaagaacgagcgttatcatccttatgagcgttgaacgaacattacttgccacgttccacgtttaactggggcaaaagcagaacgaatcagacaaagttacactggctgatatcttatgtggatttagaattacttgaaaaggaatggtttttgggtcaagtacaaaatacattacaagagtgagtggctgc

SEQ ID NO: 5465 - DNA, 319 bp, Cyanidium caldarium
  Clone ID: LIB190-066-Q1-E1-G1
gggccgacccacgcgtcagcggaagcgtggggtggtggttggtgacgacgacaggtttcgacgtcgacgatgcctaaacaaatcaaagatatcaaggaatttctgcttttggtccgcagaaaggatgcgagagccatcacaataaagaaaaacaagaccaacacgaaattcaaagtccgttgcagcagatatttgtatactttggtagtgaaagaaaaggacaaggcgaacaagttggaacaaagtcttccaccaggtttgactttgaaaaagattgattagaaataaactctatcgttgttgttcttgtgatggaaaa

SEQ ID NO: 5466 - DNA, 432 bp, Cyanidium caldarium
  unsure at all n locations
  Clone ID: LIB190-066-Q1-E1-G11
aattcccgggtcgacccacacgtcagattttatgtccttgtggtagtagtaatgtctaggcttggctaattgtcgccagtaacttgtcttcgtcgttcttcttattattatgagtgaaaaggtggagaatggtactaataacgagttgttagaaaaaccgagggttgtgatatttggtgctggaggcgtaggtggttatttggctgccagaccttcagagtgtggacgtagctttgttcacgtcatcgccagaggttctcacttgaaagctattcaggaaaataacaattgcatcgttttaaaaagtatcgatggtgactgcacttcccaattggatagcatcggggaggacgcacaaagtgtgttgaacactgcgacaactcncgtagatgccgtgatatttacttgcaaaatggaccagttggctgctgc

SEQ ID NO: 5467 - DNA, 414 bp, Cyanidium caldarium
  Clone ID: LIB190-066-Q1-E1-G12
ccggctcgacccaaacgtcaggagaatatttgcttctgaaaagttcgaggaaaaggttgtaaagaagaatgtaaacggaaacaaaggcaagaaaaactccttttggtcgtctcttccagtgagccctgttgtactgggttttattttatttgttgtacttggtagcagtttccttcctatcatacgggcagcttttggtaggaaattgggtattgaaactgttccagagctgtaaagtggagggacaacgacagtctggaataagtggcgctctggcactgtagtaaaacaactggtgacaataaaacatcactgctgaaacaagtattgcataatctaaaactttgttttacttcaaaaaaaaaaaaaaaaaaaaaaaaataaaaatatatcaatataaacatacaaaataaa

SEQ ID NO: 5468 - DNA, 384 bp, Cyanidium caldarium
  Clone ID: LIB190-066-Q1-E1-G9
gacccacgacgtcaggggaagctcaagagagaataaaagtagcccaggaacaattaatgaggaaaaaaaaaaaaaaaaaaaaaaaaaaaaaaaaaaaaaaaaaaaaaaaaaaaaaaaaaaaaaagggcagaaacacaaaaggataaaaaaattgagtacacatacatgcaaagggcggtcttcttctaggttgtcaccttatttcacttcactggccgtcttttttccctttcattattcggcatatattttgattttacgctcctcgttttccttgcatcatatcggcatttccccggcttgcctcatatcaatcttgctcgaaccgatcccccttcccaacatttgcttaccctgaatggggcctggaattttcccttttcc

SEQ ID NO: 5469 - DNA, 73 bp, Cyanidium caldarium
  Clone ID: LIB190-066-Q1-E1-H10
ccaaaaggatccaagcttacttccccttgcaagcaacgtcaaagccctccgggacggcccccaaaattcaatc

SEQ ID NO: 5470 - DNA, 385 bp, Cyanidium caldarium
  Clone ID: LIB190-066-Q1-E1-H4
gtcaggaagtcccggctcgacccacgcgcaaagacctgtaatcatgtggagagtcagaagaagaagcttccgtgaatctcaacgccatgaatcaagtggagatgatcaagccttggaaactttccttttcttacggacgtgctttgcagtcttcatgtctgaaagcatggcaaggaaaggcagagaatgtccgagcggcacaagaagcctttttagttcgtgcaaaagcaaatagtgaggctactttgggtaaatatgctggaggtactgggaatagcgaatctttgtttgtcaaagattataagtactaagggaggacatatctccagtttacctcttatgtgtgttggcctgaataaactttcttgatagtaaccttttagtt

SEQ ID NO: 5471 - DNA, 216 bp, Cyanidium caldarium
  Clone ID: LIB190-066-Q1-E1-H8
aattcccggctcgacccacgcgccaagaacgggagtcgtaagaaggcctgaaatagtcaaatacttcatatttgactttgaaaggtggatgaatttcactaaagagatgaaagcacgtcgtcaagaatctggagataccggtggctgtgtgtaactttataaaacaagatagttttatcacgtcgactctataaagatctcatgagattcttccct

SEQ ID NO: 5472 - DNA, 439 bp, Cyanidium caldarium
  unsure at all n locations
  Clone ID: LIB190-066-Q1-E1-H9
ggtacaggtcaggaattcccggctcgacccacgacgtcagatcacaaaagaacaagaggaagagtttcgcgaagcttttacgttattcgacaaagacggggatggtagggcttgttcttccaaagtgcatgggagcgcagtatcaaacacgtcgtttaggtaacatcacagtaaaggaactcggtacggtggtccgttccttgggtcagagtcctacggaagcagagttgaaagaaatgatagcagaagttgacaaggatggaaacggcaccatcgactttcaaggtactacatgcttctgtccgtanggttggagaagactctgactggaacgaatatgctcttagagtttctcgacttgatgtccaggcatatgagacaagcagatacagaagaagagatacgtgaagcgctcaaagttttcgataaggatggaaac

SEQ ID NO: 5473 - DNA, 382 bp, Cyanidium caldarium
  Clone ID: LIB190-067-Q1-E1-A1
tccgggccgacccacgcgtcagtgaagagattgcaagaagataatattttgaatagagcactatcacaaccaggagatgtatttctgtgcttttgcaacatccagttgttggtgaatgcagaaagagctattataggaaatattacttgtcgagaaagtatcgaattgtgtcgtcgattagctggacatatagcggtttggttcgatgaacatttggatgactttcgtttggaagctatcttgggagcactattgtgtacttgttattgtgagtggaagcgttttgaaggagaattgggggtacaagactggaatgaattggagaagatatcttccttagatacttggaagcttgtgcttggtacaagacaaagaatggata

SEQ ID NO: 5474 - DNA, 405 bp, Cyanidium caldarium
  Clone ID: LIB190-067-Q1-E1-A2
ggtcaggaatatccgggccgagccacgcgtcagcccaagcgtccgataaccacatatgcgacacgaagctcgcttcctaccaaaagttgccaaacaaacagaacatacgtaacctatttgaatcttttctccactttcaaaacacaaggcactattatcgacaataggcataactggaaaatgaaaatactttctagcatctcgattctagcacacacaagtatccagtgggccctgtttctaacgggagacgaagaactctacttacggggaaatataaattacacaagtaattcagtagaggaatagactccgactgctgtggcttaaaatagatacctccagtgagataagcagcattttgcaagagggatgagttctcttcctcatttaagtcacaaacat

SEQ ID NO: 5475 - DNA, 219 bp, Cyanidium caldarium
  Clone ID: LIB190-067-Q1-E1-A3
gtcaggagttcccggctacgacctaaggctgaagcagcagcaaatggtaacgtatcgtttttcgaatattttgcacctgtttattactatgtacctggctatcctcagtcttattggtataatccacaatggggaccaaatttttcacgtagttcacaaagtaagaacctacttgaaagcgacgttgccttgaaagagaatcgaagacagaaaaataaa

SEQ ID NO: 5476 - DNA, 398 bp, Cyanidium caldarium
  unsure at all n locations
  Clone ID: LIB190-067-Q1-E1-A5
tcccgggctcgacccaagcgtcaaaagaaacccaaagcaattgacgggaatcggaaaaaggggtggatcacgtaaattaatccgataaaccgagaaccttacctctccaagaaggtgttgcacggctgtcgaaagaacgtgctgtgaactgagagaacgtacgagaaagccaagtgaggaaaagaaggcaagtagagggcggcccgagaaaggagagggcgtaagacgtgatacagagtacgaagaaaagagaagagagctagaaaggaggtaaaagaagagtaggaggactagaagaggtacggaattcacgaagaaggagcgtgaaggaaggangaatcccaagtaatcgaggaagaaaaagcttcggtgaaagcgtgaacggattttgtacacac

SEQ ID NO: 5477 - DNA, 423 bp, Cyanidium caldarium
  Clone ID: LIB190-067-Q1-E1-A8
aggtaatggtcaggaagtcccggctcgacccacacgtcagcggacgcgtgggcggacgcgtgggttcgaggagagagagagagacagacagatggccaacgctggtcaagatggccttgtgcaagtcaacaagcatagaagagtaaagagattgcaagaagatgagattttgaagagagcactatcacaaccaggagatgtagttctgtgcttttgcaacatccagttgttggtgaatgcagaaagagctattataggaaatattacttgtccagaaagtatcgaattgtgtcgtcgagtagctggacatatagcagtttggttcgatgaacatttggatgactttcgtttggaagctatcttgggagcactattgtgtacttgttattgttagtggaagcgttttgaacgagaaattggggg

SEQ ID NO: 5478 - DNA, 353 bp, Cyanidium caldarium
  unsure at all n locations
  Clone ID: LIB190-067-Q1-E1-B4
cccacgcgtcagggaatggtggcgattgggaacgagaaaggcgtcgacgacgaaagaagatcgctgtangaacaacgacataaaatgtctgttttattacaaagttcggattttcaacacattcttcgtattctgaataccaacattgatggcaagaggaaagttatgtatgcgttaaccgccataaaaggtgtgggtacacgtttctccaatttagtcgtaaaaaaggcagaagttgacctgagtaagcgtgctggagatttgacgtcggaagacattgaccgcataatcaccatcatgcagaacccccgacagtttaaaataccagattggttcctcaacagacaaaatga

SEQ ID NO: 5479 - DNA, 419 bp, Cyanidium caldarium
  Clone ID: LIB190-067-Q1-E1-B8
aggtaatggtcaggaattcccggctcgacccacacgtcagcccacgcgtccgcccacgcgtccgcccacgcgtccgtagaaagggagtcgccacttgaagaattggtcaaggatgagtaaacggaaaagtaacaactcccttgccgaggaagaaacggttgtgcggtttttagaacagaacaacagcaaaatcgaccctttagcgttcaaaacattgtggatgcactatcgaaagaaggaataaagaaggcatcttgtgagaaaattctaactagcctagtcgaaaaggaagtagtatcagtgaaggaatatggaaaggcaaagatatacctatttcgacaggacactattgagataccagataagaaagaagtggaagagatggacgagcagttaaagtcgaaagaagaagaatatgc

SEQ ID NO: 5480 - DNA, 348 bp, Cyanidium caldarium
  Clone ID: LIB190-067-Q1-E1-C3
cacgcgtcagagaaaatgaaagcacagaagaatgtaaatggttagagtaaaaaccataaaggaagtaaaagcgggaatctgagaggaggaaagccacattgggactgagaaagggtccaaacaagagaagtcagcagtggggaaaattgggcaatgtacagggaagtatgacccagtaatgaggagtggagtaaacagaaaaggaagtagaaggagggaatgaagggaagttatggcaaaaacacgtgccaacagcagcggtaaaacgtgtgtagcaagcgtagagcagaagaactgggtgtaaaggtcgagtagtagagtaagtgtaaaagggaaaggaaaggagag

SEQ ID NO: 5481 - DNA, 141 bp, Cyanidium caldarium
  Clone ID: LIB190-067-Q1-E1-D10
acgaaaaaaaaaaaaaaaaaaaaaaaaaaaaaaaaaaaaaaaaaaaaaaaaaaaaaaaggaagacgcacaaaaggataaaaaacttaaatacacatggatgcaacgctcttggtcttctattttgtctcctacgttcattt

SEQ ID NO: 5482 - DNA, 332 bp, Cyanidium caldarium
  Clone ID: LIB190-067-Q1-E1-D6
cccggctcgacccaagcgtcaggggagggaggatgatggtttggttgcggttatgggtggggttgacagggatggcacgtttcgctgcggcgataggtgcctggtggaacccatcctcgcccatcgataccatctaccgaaacattgcaccatcgcatttgctcgcatctccagtggatgaagcgtcgtcgtcgttggtaagccgcttatatgccacctggttatttctttcgaccgttgtgcgatgtagttttatgctatcttccgagttttccgtgcgtctagccgtcgtcaccttggacacctatgtcgtcccgttggtgcactttgca

SEQ ID NO: 5483 - DNA, 371 bp, Cyanidium caldarium
  Clone ID: LIB190-067-Q1-E1-E1
cccacgcgtcaggtcgagggacgacgagtcggtgagaagcgctttgcaacgttacattcaagttgaaaccaaaggacaagttgaaaattgttgtgttcgttgccggttgagaacacttggagtaccatgtaagctagctggttgtgatgtctactgcttgccgcaacctactttggaacgactctgtgaggtgaacaacaaccacacagaggcttgtgcaaatagttgcaaactgtgtttgggactattgacggatcaagtgttgcagtagttttgtagcgttattcaaacgaaattaaaggagtttcaagtggacgatacattccgaataagtgtcaagttgtgtgagtcgtataaagatcaactgctgc

SEQ ID NO: 5484 - DNA, 392 bp, Cyanidium caldarium
  unsure at all n locations
  Clone ID: LIB190-067-Q1-E1-E10
ggtaccggtcgggaattcccggctcgacccacgcgtacgggcagagtatgaagtagagctggcggaaaatgaccgcgttggggacttttttgtcaagtttcatggtcccgtagatacaccctatgaaggtggtgtatggaaagtacatgtcactctaccagaagcctatccctacaagtcaccttctattggctttgtgaaccgtatttatcaccccaatgtcgacgaaatgtcaggttccgtttgtctggacgtcatcaatcaaacttggtcacctatgtttgacttggtcaatatttttgaagtatttttgcctcaacttttgacctatcctaacccctcggaccctttgaatggtgaggcagcggctttggaaatganggaaccggaaa

SEQ ID NO: 5485 - DNA, 415 bp, Cyanidium caldarium
  Clone ID: LIB190-067-Q1-E1-E12
ggtaacggtcaggaattcccggctcgacccacgcgtacgatgggagaatgacagtggacaaggaaaggaaagaacctacctcctcctacccagcagagtgggaacagcatcgtatcgtccagtccaacttgtttcgtcaacaagtagaaacctttttgcgtcctattccaaaggatgtgcaacaaagaatggaacgaattgcggaagccttgttattacaacctcaagacacgttgatagatgtgggttgtggaacaggagccatggtaccttttattcacaagtatattcctttatctcacatttggttgtgtgactgcagtgaagccatgttagaacaagccaagaaaaggtttcccgagtgtcattcgattcactgcgactttttaaagttgcaacaagcaccggagaagac

SEQ ID NO: 5486 - DNA, 387 bp, Cyanidium caldarium
  Clone ID: LIB190-067-Q1-E1-E6
gaattcccggctcgacccaagcgtcagcggacgcgtgggtcacccacgcttccggaattcctgtggactggtggtcacttcgtactttgatgtgtgacatgttgaccggactgccgccattttagtcacaaaatttgaactcgatgtattaacagatattgaaagcagaactgaagctcacttctgatccgaacattctctccccagatgcaaggaatctgatacaggcattgttgcaacgtgatcctcataaacgtttaggtactggaccaatacgagcgcatgaaatcaattaacatcctttctttcgttgtatagatttcgaaaaattgtatagaagagaaattgaggcaccttggaagcctcctatgctttctgatgaccata

SEQ ID NO: 5487 - DNA, 386 bp, Cyanidium caldarium
  Clone ID: LIB190-067-Q1-E1-F1
cacgcgtcaggtgcttttcgtatttccagttctgtcattgcaaggagaaggaagtcggttgctttccgaagtatggttctttaaaaagtggggacctcttatcatataaatatagatatggacattgtatgtacctatttcaatatttatattccataatagagagatgaaacattgtatagaccgttgtgttgtcttggaaacctcgtagaaaacccaagtttctccctggggaggaattgaccaatggacacacaaggcatccagaagcagcaaacgcactttggagaaagttggtggaactccatctatcattgttgttgtggtgaacgatggtggtgttacaagtcacggattccaagaccaagaaaacatatgaaataaat

SEQ ID NO: 5488 - DNA, 403 bp, Cyanidium caldarium
  Clone ID: LIB190-067-Q1-E1-F10
ggtaacggtaaggaattcccggctcgacccacgcgtacgcataccgctgggacagttggcgttttctatctatgctggttatctattcttcggtccacactacattcaccaagtaccttccaaagaccaaaccattggtgtgagtttattggtatattgtgtatttgtgggtatttgtgtgacttttgtggttgtcacccgatggttgactcgaggcagggtaatcgaaattcgtcaacatgtagtgaaaaacaaatccacacaacaagcaacaagttggttgcagttttattgccatcgatatttgggcataggaaaaccgctttgtatccaagtgaaagttggcaatgtacgacagataggcaacgtggaaaggttggcaaggtttggtgcgttggccaat

SEQ ID NO: 5489 - DNA, 310 bp, Cyanidium caldarium
  Clone ID: LIB190-067-Q1-E1-F12
ggtaacggtcgggaattcccggctcgacccacgcgtacgcccacgcgtccggcaaataggaatatatggatttacaaggacaagccacttgtgaaaaatataccaaaaaaggcatcttgtggacaacgttggtcgccttgatcgttggactagtcacagacgattacctgcgaatggttcaagtatttatattgggagtagttttggtagctatgggcgtacttttcccctggccatggtattcaagacatccacttgtgtttgtccacgccgcaaccaaaaacaacaataataacaaccattcttaacc

SEQ ID NO: 5490 - DNA, 351 bp, Cyanidium caldarium
  Clone ID: LIB190-067-Q1-E1-F4
cccacgcgtcaggagagaatcatgaagtagaggaggtggggtaagagatgaaagaccactgcatgaggataaggaatctaactgagtaaggaaaataagcttaagctagtttggctggggaagtaaagcctaagaaagagtaaattaggcaagcaaaggcatgagagaagtataatagcagaagcatgcttgaagaaaaagaaagagatttcagaaagggaagaaaagtcagctatagagaacaggtgaaggagaactcaaaaagaggagagcaacgaacgatcgaagaagaaactttgggggtaacaggttaatgtggtgttagagaacgtatcaagcaccacgattgac

SEQ ID NO: 5491 - DNA, 349 bp, Cyanidium caldarium
  Clone ID: LIB190-067-Q1-E1-F5
ttcccgggccgacccacgcgtcagaaaggacactgcgtttgaaacagagagtaagaagaaggggcggaagaaacgaagaaacaagtcgaacaagaagaatgaaatatcaaatcgatgcaatgtatgcggtgaaaattttacttctagaaacaaactttttgagcatatcagaacggagggtcatgctttacgagtttcgtaaggtataattgtttttgcatccactttttgcaaatagtagcaaagtaccgactagtgaatagttagcaattctcagtgtaccgtgttatttatacgaaattttgaaacaacttgattacatataaagtgcatatagatagatcctttc

SEQ ID NO: 5492 - DNA, 409 bp, Cyanidium caldarium
  Clone ID: LIB190-067-Q1-E1-F6
gaattcccggctcgacccacagcgtcagattttatatttcagtcgcgaaaattgcgcaaggctcaagaggagaacttcgcatggattggttgagacttatactgagattcctccatattcgaagtggaacaaccacaaccgatcacgaaaactcacatggagtccacgttatttcgaaagaccaagtagttacatctacagcgactcaacaacctttgcgccgcgctcgtcaaagaaagcctatgaatactccaaacttctttgcatcaagatgctgtttaccagtttttggcgatgaaatagttggaatatttgtaaattgtgatactgtaatggtgcatcggagcaattgtacctccacgagtagtttagatgactcttttcaacgctttcatttgtcctggaaaaa

SEQ ID NO: 5493 - DNA, 373 bp, Cyanidium caldarium
  Clone ID: LIB190-067-Q1-E1-F8
gaattcccggctcgacccaagcgtcagcccacgcgtccgcatttccatttttcggtttgtgaaagtaacaaagattgttgtgctatatccttttggaggaagctcatggaaggaaaggatcgtccaagtttatggaaaaaagctttgaaccgtgatactgtgtgggaaaaggaccagatattagatgtgctgttttggatccgccacgtggtagctctgttgataggttgtctattcggccttctcaaattaactggcttaccaggctttattctttacatatctatttggttcactatttctcaggcttatttcaagtggtttttagatttagacgaagacgactttggtggttggggaaccgtacaacaag

SEQ ID NO: 5494 - DNA, 313 bp, Cyanidium caldarium
  Clone ID: LIB190-067-Q1-E1-G1
ggtcaggaatatccggccagagacgaaagcgataaagacatgagagaaaagaaatccgaaaaagaagagaaaaaggtaagaaagaggaccgaatcagggtaagaggtagaggagcaagaagagaagagagaatgctgggtggagtagcgaaacaagagaagggaagtaaaaggtaagaaagaggaaaggtttacgacagaacgaagtagaaagaagagagtgtaaggcggcgtcataatagaaatccgaaaggagtagaaaagaaaaacgtagatgaacaaacaaaaagagaaggtgggcggggaaagataaa

SEQ ID NO: 5495 - DNA, 388 bp, Cyanidium caldarium
  Clone ID: LIB190-067-Q1-E1-G10
gtacggtaaggaattcccggctcgacccacgcgtacgatgtttttgccccatcttgtggaagacttggcgaggattcgcggtatgatgaaaccgggtagtttattttcttgtgttgtttggggagaggaaaaggactgtcatattttttacgcagctaggagcgttatcagtcctcctcctccacctccaggaactccagtttcttatggtaccaaggagaaagttatggaagcccttagaaaggcagaattttcagatgtaaaggcggtggagtttgaggttgttcatgaaaccaaagatgccgaagaatacatcacccttatgtctggtgtcaataaatggatggaaaaaagtttgggagagaaaggttccgaactttggcaaaaa

SEQ ID NO: 5496 - DNA, 273 bp, Cyanidium caldarium
  Clone ID: LIB190-067-Q1-E1-G11
aaaaccaacaaagagcttttaatttccccttttgctttgtgaggatttgttcacactgccttttgaggagtggtcactcacaaggcattttctctcaaaaaaacgcccccgaaataggtagaaaatccagcaccagcacagcaacaaccaaccaacattgctacttcttagggacaatcctgaagcaactgagcttcctttcccagttggcccttttccaaggaagtcaatacgcgatagtctgcaacagtaggaatccaaccaccagtttca

SEQ ID NO: 5497 - DNA, 407 bp, Cyanidium caldarium
  Clone ID: LIB190-067-Q1-E1-G12
ggtaccggtaaggaattcccggctcgacccacgcgtacgcccacacgcctggcatggtggctggttgcttctatcgttgcgaccgctgccagaacatccatcgcgttgcacagcttgcaccacatcaagacatcggtgcaggccctgaccgccttgttgtggggaaatacgtgtcacaaattcttcaatatattcttggagttcgttagctattgggttggcgaaactggtggatgtattccgactgtcgcatactatcgcttattgacctcattgtgttccgaccacctgggatttgcaactcagttgcatcaagatcatgcctatcaatcagcaatgtcagctggctgtcagtgtgtaggtcgtggactgtgtacatatatagtcagagtgtgtgtcagataaaa

SEQ ID NO: 5498 - DNA, 394 bp, Cyanidium caldarium
  Clone ID: LIB190-067-Q1-E1-G3
ggtcaggaatatccgggccgacccacgcgtcagctgtcgtcgatgtcacttttcgtttaaagacaccaaccacttatgacgatatcaaggcaacgatgaaagctgcgtcagaaagcaaagctttaaagggaatattggcatataccgaagatatggtagtttctactgactttgttcacaatagtcattcttcgatatttgatgcgaatgctggaattatgttgtcggaaacttttgtgaagctgattgcttggtatgataatgagtggggctactccaatcgtgttgtagatttggtgcaccatatggcgaaagttgatggtgtagcttaactctgcttttcttgttgttttttcgtgtattgtttgttttgtgaaagagatgaaatgtgttg

SEQ ID NO: 5499 - DNA, 381 bp, Cyanidium caldarium
  Clone ID: LIB190-067-Q1-E1-G4
acgcgtcagcccacacgtccggggctcttatcgattgcctgccttctctcgacactcgttggtttgtcctttgaaaacacgttttagacagattcaaatggctgcagtaacttttaagaaacagaatactgatgtacctggtattctatacggagaaaatgctcccaacaactttggagttattgttgtccaagagtggtggggtttgaacgaagtgatcaaaaaacgagcacaagagctgagcgatggtttgcaatgtaaagctcttttgccagatttttatcgaggaaaagtagccacccaaccagatgaagctcatcatatgatgaccaatttggactggcccggcgctatcgatgatattgcagctgcctgtcaata

SEQ ID NO: 5500 - DNA, 379 bp, Cyanidium caldarium
  Clone ID: LIB190-067-Q1-E1-H1
gggccgacccacgcgtcagaaagaggaaaggtttacgagagaaggaagtagaaagaagagagtgtaaggcggcgtcataatagaaatccgaaaggagtagaagaaaagagagagaagaaagaaaagaagagaaaagccgtactgaagaccgacacaggtactcgaggagaaaggagacccaaattaaggtgagagaatggacgataaggaactaggcaaaaggatatggtatctgcggtagaacatatgaaagaagcagcaccgactgtttagcaaaaacacagcactctgcagaaaagagaaaatgtaaagtatagagtgtgcggcctgccaaatagtagagaagaaatcgatgaaagtgaaagcgagtaaaagatga

SEQ ID NO: 5501 - DNA, 401 bp, Cyanidium caldarium
  Clone ID: LIB190-067-Q1-E1-H3
gggccgagccacgcgtcaggaggagcccgtatttcccttacttatggaacttaatgtagtactacatatatgtttggaaaagtctgaaaagttggatgctgtttctgattatttcttttgtcattccagcttttgcaaggaattcaaatcgcttgtaaaagtagtagtcgaatatatgcgcaagtcttcggatgaaatgattatctatgcctgttctagtcagttggaaattggtttgaactggttccatcagtgtctttccagaattgtttctctaaacaggccaaagaaaggttccaagtcttcttcttcgagtgtagtcgatcagaacaaggaacgaccagtgccttctatcgagcacctttgggatagaaatgaattggcacatctgatatggactc

SEQ ID NO: 5502 - DNA, 417 bp, Cyanidium caldarium
  Clone ID: LIB190-067-Q1-E1-H6
tcccggctcgacccaagcgtcagtgaggaggagtggctgtctctttgcctctccaaagggactttattggagaagattcttctctacagaatatgattatacaggatgaactggaagagaatccacaggattgtcggcttccgaacaagaagccagagagaaagtaatacgtttgtatcgatatgcgctaagtagtgtcaaagatattcgcaaacactatcgtttaaatgaaagcaaagaagatatagctgcgtgtattcgagatttatttgaaaggcatagacatgttcaagatcgaaagcttattgatatgttggtgttcaagggacgacaggacatagacgaagttcgcgcccagtggtaaagtcctcatcaagttctcaactatttaagagcatttgatgaaaagaaaattaa

SEQ ID NO: 5503 - DNA, 222 bp, Cyanidium caldarium
  Clone ID: LIB190-067-Q1-E1-H7
agcccacgcgtccgaaggactagaagaggtacggaattcacgaggaaggagcgtgaaggaaggaggaatcccaagtaatcgaggaagaaaaagcttcggtgaaagcgtgaacggattttgtacacactgcccgtcaagttctggaagtgtgctaggaataagcaggagaagtagaagagagtaggaaaagaagaaaggaagtgaagacgtaagacgtgaaaa

SEQ ID NO: 5504 - DNA, 391 bp, Cyanidium caldarium
  Clone ID: LIB190-067-Q1-E1-H8
ggctcgacccaagcgtcagaaggactagaagaggtacggaattcacgaggaaggagcgtgaaggaaggaggaatcccaagtaatcgaggaagaaaaagcttcggtgaaagcgtgaacggattttgtacacactgcccgtcaagttctggaagtgtgctaggaataagcaggagaagtagaagagagtaggaaaagaagaaaggaagtgaaggcgtaagacgtgatacagagtaggaagaagagagaagagagctagaaaggaggtaaaagaagagtaaaaggactagaagaggtacggaattcacgaggaaggagcgtgaaggaaggaggaatcccaagtaatcgaggaagaaaaagcttcggtgaaagcgtgaacggattttgtacacac

SEQ ID NO: 5505 - DNA, 445 bp, Cyanidium caldarium
  Clone ID: LIB190-068-Q1-E1-A1
ccgggccgacccacgcgtccacacccaactagtagaagaatatgttggcgtttacttgtctcccagactgtcgttggttagagacttctcgattctccagatgtgccaaagccaataccgtctcgttgcgacgtagttcccagtgttcacactcttggaagagtgtttcgatgaactacagtccctattcgataactaccgacaagtcagaaggacatattgtccccggtactttttcaagatttgagtttcttgaaggtcgagtcaccggtccaaccgtcttgaaccctagcatacttgactttacagtgtctaatgtttcagatgctgcctttggagaatggagagcattatcggcttcaagtagagcgaaagaactggaacacagaagaaacgtcaccaaagcgacaatagaaagtctcaagaggactcctaacgaaaagtc

SEQ ID NO: 5506 - DNA, 214 bp, Cyanidium caldarium
  Clone ID: LIB190-068-Q1-E1-A10
aaaaaggcaaatacgggaaagcagtaaaagaagaaagagaaaggaaaaaactgagtatcaggaagaaaagagggagtagatgaggaaagaaagatcaaggaagtaagagtaagagaaggagtaatgtgaatgaaagcaggaaagtatttgaagaagagagtgtaaagcgcgtaccttttgcataatgtcccagcgagtgaaagaggaagcaaaa

SEQ ID NO: 5507 - DNA, 223 bp, Cyanidium caldarium
  Clone ID: LIB190-068-Q1-E1-A11
cacgcgtccaccaacgtaagacgtgaagaggtacggaattcacgaggaacgaccgtgaaggaatgaggaatcccaagtgatctacgaagaaaaggcttcggtgagagcgtgaacgtgaatttatacacactgcccgtcaagttctggaagtgtgctaggaataaccaggagaagtacattagagtaggaaaagaagaaaggaagtgaagacgtaagacgtgac

SEQ ID NO: 5508 - DNA, 342 bp, Cyanidium caldarium
  Clone ID: LIB190-068-Q1-E1-A5
gacccacgcatccatacaagctctgtactagacgctttaaacattactaacgacattaatgctattgaaggtctatcttggatcaactttgcctttagcctattcgtttgtcgaattgctatagcagatggtttgttggttggttcaagaagtgcaggctcggggaaacaaaatactggatatagtaataatgcgtgagctgttgggtacttgtgaatacactactgtatcatgttgtgcataacatacttcgttgtttgttacacagattgtattggtgcagtgtactaatacttagcttcacatcagtttcgaatttaccgccaaaaccctgacgttacc

SEQ ID NO: 5509 - DNA, 445 bp, Cyanidium caldarium
  unsure at all n locations
  Clone ID: LIB190-068-Q1-E1-A7
gacccacgcatccaggcgtccagtatgaaaggagaaacgagtgtagcactgtctagtcgtccaactcagcgaaacagcaataactgtgaaaatgcagtaaactagcagtaggacggaaagaccccataattcttgactagataggtttagggaggagagagaatcatgaagtagaggaggtggggtaagagatgaaagaccactgcatgaggataaggaatctaactgagtaaggaaaataagcttaagctagtttggctggggaagtaaagcctaagaaagagtaaattaggcaagcaaaggcatgagagaagtataatagcagaagcatgcttgaagaaaaagtaagagatttcagaaagggaagaaaagtcagctatagagaacaggtgaaggagaactcanaaagacgagagcaccgaacgatcgaagaagaaactttggg

SEQ ID NO: 5510 - DNA, 262 bp, Cyanidium caldarium
  Clone ID: LIB190-068-Q1-E1-A8
aattcgcgggccgacccacgcgtccatgtacattcaacatcatcaaatgccaaagggaggaaagaaagattcttcaaagaaagaagccacaagtaaacctgcagcagcagatgctacaaagacgacagaaaagtctggtccggaagccaagttgaagggaactggtgcaaagaaacaataaaaagttgactatgcatgtgcagtcctgttatgttttgtgagttctgtttgatagtttccagctattcttttggtagtgaat

SEQ ID NO: 5511 - DNA, 443 bp, Cyanidium caldarium
  Clone ID: LIB190-068-Q1-E1-B10
acgcgtccgacaacgcgtccgcccacgcgtccgcccacgcgtccgcccacgcgtccggtggacgaccgcaagttcttatgatgttggaacgtttcattagttatattcaacgttttccaggtatccattgggctactatggaagaagttgcgcaggtttttagaagaagacaaccttttccatgtgcttagttgcataaagtttatttctgaatgttgaacaacttccatatggatcaaaaaaaataatatctttaatcaactgctccaaacttgtatttatccgttagcatgttgcaaaccacgttcttcaaaaaagaaatgggaggcccccccaaaggtttcaccctgatgtacacggaaatccaacgctaatacccccctaaaggtccccctaatcttcattcaagggccgtttttttaaaatttccggactggaaaaac

SEQ ID NO: 5512 - DNA, 431 bp, Cyanidium caldarium
  Clone ID: LIB190-068-Q1-E1-B11
acgcgtccaacaacgcgtccgcccacgcgtccgcccacgcgtccgcccacgcgtccgcatcaagttgtggtcgttgaatcgacaagaaatgatacaacatctcaaagttgccgatgctggtagtttgttatcttttgatatttatgggaagcattcttcatcaggtattactagcgtatggattggaggaagcaagaagatacttgttttattggagtgggatggacacaagttgaaggaagagtatcgacaagttgtattgaaaaggagtggattgggagatgtcgttgttcgacaagatgaacgtatattggcagttgctcattgggatgccaaagttcgattatatgaaatacaaaacaactttagacaattagcaacgttacctcacgaccaaagtggactgcgcatacaatttgcacctcgagact

SEQ ID NO: 5513 - DNA, 391 bp, Cyanidium caldarium
  Clone ID: LIB190-068-Q1-E1-B5
aattcccgggtcgacccacgcgatccaatcagtttacggatgacacggtacgttccttacatgatgcaattatgattgttaagcgtacgttgaagcattccaaggctgttcccggtggtggtgctgtacaaatggtgctttctaaacgtcgtcgagactactccagaactattcatggcaagtcgcaactgttaatctcgacttttgcagcgtctctagaaattattccacgaacgttgtgtgagaatgcatggttagatgcaacagacattctgaacaaacttcgagcgatacacgcgaacaatcttccctatgtacgcattgatttgagcatcggctatctatgtgacacgtggaaaagtctcgtgtgggaatcgtcactagtgaagtc

SEQ ID NO: 5514 - DNA, 440 bp, Cyanidium caldarium
  Clone ID: LIB190-068-Q1-E1-B7
acccacgcatccagttggttgataatgatatgtccttctgccgttgacgtggaagccatggagaaaatagtcgacaaagagtcaccattcttaaataaagatgctcgtccagttatactggtgaatcccaatctagttgatatgggagcaacaggtttaggcttcaacgcaagacagctaagacaacgcttattgagcacgtttgaatccatctacttccttcgagtgtattctgcgggagttgtggttcgtcagtatccctttgagtggagtatttggttggaaataaccaacgaagacgaaaatacttcttccgactctccctacaggtatatatatgaaacgtttcccacgtcttactccttcacaatgttaggttgctagattgttttcagaccaagcctagtgatgacactattcaacagatattccgaaattca

SEQ ID NO: 5515 - DNA, 423 bp, Cyanidium caldarium
  Clone ID: LIB190-068-Q1-E1-B8
acccacgcatccactttttgtagaagaatgaaactttcgagtgttttgacagaaggcgaatatcgtctgtttcagtggatagtttttcttggaggttctttttatggtggttggctgctttattctgaccataagaatagtgcagtttatgctgccaaggaagaagcttttattgctcaagaaaggaacaaagaaaggcccatgagtgaagaatactggagagaattgcaagaaataaaacctagaaatttggaagagttgtacaagatgaaagaagaaaaggctcgaaagagagcagaaaaatatcaaaggtggaaggaaaacctacttggtttatttggcgtcacgtcaagtccccgttcgagtgaggaagatagtggctaaacgaaggtcaactgtccaagtcgaaactttgttttgaaa

SEQ ID NO: 5516 - DNA, 440 bp, Cyanidium caldarium
  Clone ID: LIB190-068-Q1-E1-C10
acgcgtccgacaagtgctattcaggataatgacttgggagttgtatttggctcgcagacatttggaaaaggtctcgtacagaatgtcgatcaacttccatttcaaacagcattgaaatataccgttggaaaatattatactccgagtggtcgatgtattcagtcctcaagttattcatccgatcatgaaagactaaagataacagctatccatgaaagaaaggtatttcaaacgaagaatggacgcgacgtattggacaatggtggaatcgaaccggatattccgtgggaagaaactgcaattcctgaatggagacgcttattacatcaacaaggattgttgttttattttgcaaatgattatgcagctacccatccgaaaggaatagggcccgatttttatgtcgatgatgaattatttgcacagtttacaaagtatgt

SEQ ID NO: 5517 - DNA, 406 bp, Cyanidium caldarium
  Clone ID: LIB190-068-Q1-E1-C5
attcgcgggccgacccacgcgatccaatcagcttacacatcacacagaacaaggtggttggtggatggagcgttggactctttttactgataatggacaccgactaggtgataagtttggcgtagatgctgatggcacaccttggtcggagtggtggatagaagaggagttgtctactgcaaaggaacaaggtttgagtcgcgacatgaagaaagttggtcaaaagtggggactaaatgcataacgtgaacgttggcatgaaacttggaaagtatacactaatggaaaggttgaaactacgtatcgcttagatagagccaattcaggcagttgttgaacatacgaacttggcagctgtgtggtagtaattttgaagatacctatttctgtttgttgtacaatttca

SEQ ID NO: 5518 - DNA, 387 bp, Cyanidium caldarium
  Clone ID: LIB190-068-Q1-E1-C6
attcgcgggccgacccacgcgtccagtggaatattatcatacgaaaaaatggaaggagaggagatggacgaagaagacgagatggacgaagaagacgaaatggacgaagaagacgaaatggacgaagaagacgaaatggacgaaaaagcccagaagccaagataaggtatcaaagtaaagaaagaaggaaaaggagaagaagagagggtaggcttagaagcagcaaaccagagaggaaagcgttaaagcatgaaagaaaagaaatccgaaaaagaagagaaaaaggtaagaaagaggaccgaatcagggtaagaggtagaggagcaagaagagaagagagaatgctgggtggagtagcgaaacaagagaagggaagtaaaacacaaa

SEQ ID NO: 5519 - DNA, 310 bp, Cyanidium caldarium
  Clone ID: LIB190-068-Q1-E1-D3
aaaaaattttcgacgctcatctgatggagaaggctatgaatttcgtgaagaaactgcagaaaaattgtttcatggtgcaagtaacatgtcttcatcacttccttcataattgttcaagattcgctgtattcttttatacagtagagaacacaagtttcaatcgacaaccatgcgaaactatcccgatagtgttttatagttggatgaatctatattaagtcttaaggactatgttctgtataagaccatttttcgacaagtgtgaaaagtaaatggctagaattgtttcttttcaaaaaaaaaattgtac

SEQ ID NO: 5520 - DNA, 398 bp, Cyanidium caldarium
  Clone ID: LIB190-068-Q1-E1-D7
attgcccggccgacccacgcatccaagcgaacttgtcgctgtagtgcatccgaatcaacaaaaagcagaagaatgggcaaaagagaatcagaaggaaggagatttgaaagctttatgcaaggacaaagacttcaagaaagctgttttagatgatttgaagaaagttgcgaaaagcaagtccttgaaaggatttgaagttgtgaaaaatgtgtatcttgaaccggaagcattttctgttgagaatgatttggtaactccaacgatgaagctgaagcgtccagcgttgaacaaaaagtatgaaaaggaaatagaaaaaatgtatcaagaattgcgcaaatctcgaacatagaacgatacttctgacatttataaaggttccaatttttttcctgtaaaaa

SEQ ID NO: 5521 - DNA, 288 bp, Cyanidium caldarium
  Clone ID: LIB190-068-Q1-E1-E10
gaaggatctaatatccaatgaaaaccgttatttggtgtgcgaagagggaatagacttactcgacaagatgcttcgttatgatcacgcggagaggataactgcaaaagaagcgatggatcatccattttttgatgaagttagagccaagtgcttatcgaaggaagagaactattctatggataatgacagtactacgactactacaagcgcaatgaatactgaaccttgctgatttgatcaagtttccttttctctgaataaagagaccttttcctatttgtgcaaaac

SEQ ID NO: 5522 - DNA, 429 bp, Cyanidium caldarium
  Clone ID: LIB190-068-Q1-E1-E11
acggtctagtattcccgggtcgccccacgcgtccgacaacgcgtccgtgaaaatcatggtagacactaagcttaaggacggtgctagtgctgctctttggacttgccgcctatttctctatacagttgtgttagcattttcagcaacaataattggacttgatggaaggaaggcagataacatatggaacgatgccctatattatcatggaaaagtggtgaacttttgtgcatattcggcttcgtctgtttttgaaggtggcgaccatggcgcatgtaaatatgtgatggctttggcttctatcagcttgattttagttttctttctttggttggcctcctttgtcgacgcattgtatccaatttctacagagttccggtttgtggaacttggtatcaacatattccttactatgtggtggttggttgg

SEQ ID NO: 5523 - DNA, 436 bp, Cyanidium caldarium
  Clone ID: LIB190-068-Q1-E1-E7
gacccacgcatccacccacgcgtccgggacaattcggatatcaccgcggttattaacaagagttcggccgattacatagagagtttggtgatggacgcacgacaaaaaggcgcttcacaggtttgtccctacaaacgagagggcaatttgctctggcctacagtcttcgatcatgttcgagaagatatgaagatagcttgggaggaaccgtttggtcccgtattgcctattgttcgtgtgaagagtgcggaggaagcagttgagtttgccaataggagcactatgggcttgcaaggctgtgtatttaccaacgatattgaaaaggctattcacatatccgatgagctgtcaaccggaacggtgcaagtgaatggacaaccagcatgaggacctgaccattttccattccaacgttttaaggattcgggattacgtt

SEQ ID NO: 5524 - DNA, 408 bp, Cyanidium caldarium
  Clone ID: LIB190-068-Q1-E1-E8
agtacgatctagaattgccgggccgacccacgcgatccacccacgcgtccgcccacgcgtccgcccacgcgtccgagaagagaagagagaatgctgggtggagtagcgaaacaagagaagggaagtaaaaggtaagaaagaggaaaggtttacgagagaaggaagtagaaagaagagagtgtaaggcggcgtcataatagaaatccgaaaggagtagaagaaaagagagagaagaaagaaaagaagagaaaagccgtactgaagaccgacacaggtactcgaggagaaaggagacccatattaaggtgagagaatggacgataagaaagaggcaaatacgggaaagcagtataagacgaacgagaaacgaaaaacactgagtaccacgaagaacagagggagtacatg

SEQ ID NO: 5525 - DNA, 440 bp, Cyanidium caldarium
  unsure at all n locations
  Clone ID: LIB190-068-Q1-E1-F11
accggtcttatnttcccgggtcgcaccacgcgtccgataggatactctaacctcgatggtttatcacttcgactcggtatgctgctctggatactcgttgatgaatattgtaaactatttcctgggaattttgtattcaaattctgtgctcgctcatccttgttttcttgaacaggtcgagaacttgtaacggttccataagaaatggaatccaacttgctcatgaaattgtctttccatttctcgctcgtagaattttcagtacttgccaaagaagcctttgtctcggaaactgaatgctcctttcctgatacattttcaaatgaaacctcttccttcttggaagtaatcggtgtttctaatgatgtattcaaagatgtattccatgtcgtagaagactgctttccaacaaaagacagtgaagaagaattggacggtgt

SEQ ID NO: 5526 - DNA, 397 bp, Cyanidium caldarium
  Clone ID: LIB190-068-Q1-E1-F2
ccgggccgacccacgcgtccaaccacgcgtccggacactgcaatgtcatgagtcatgcaacacaaaagtgtttattagtagacatgtaactctcaaggtccaagaacaaatgaccttttaggagcaacacagaagcgacactcgaaagcagttaagttgtttgtgtgcactggcctctattcttgtgcactttgttgaatggccgctaaagcactatcttccttggcagaagccttctcctgctttttcgttggcgatatgctcgacgcaagttcatccgattctttgctagaatcgactgctacatgctgcttccctaatttcgtcctgatccatgttttggtttgactccagttgtattttgccaatccaattaaaccttcatcgaatatatttc

SEQ ID NO: 5527 - DNA, 435 bp, Cyanidium caldarium
  Clone ID: LIB190-068-Q1-E1-F4
ccgggccgacccacgcgtccacccacgcgtccgcccacgcgtccggccatttggtgcagaacactttggagcagtatcgccagtgacagtggggaaaacataagaagtccaaactctttggactctacgttgctttctatctagactgggcaatgtaaagaaaactgagagtgtcaagttacccatttttgtgggtagagtgacaagggagttgcgataccaagatggcatgtctacgcactcgacgcaaaaagagaaagactagggcaaaagactgaataagattcgatcgagagtaagcttgcatggcaccggcaacgtagtaaccgctggttcgtctgttacacggccagctgtcgtgtcgttatctctcccgcgagactagctccggttttacaaggctaccaagccatcttgcaatcgtctagacacctg

SEQ ID NO: 5528 - DNA, 454 bp, Cyanidium caldarium
  unsure at all n locations
  Clone ID: LIB190-068-Q1-E1-F6
aattgncgggccgacccacgcatccacaattgcgtgtgagaagggacgaaggaagaaagaatgttggtattaacaataggagattttcatagtatggataaaatcatgtgtattgtgttgttttaacgcttctagttcctagtcgagtggctgcagtgcctctcaagtttcgagaacttctcgttccaggaaaaatacaacgagtattatgtactgtaagaaacacaagaagagatgcacaaagttttcatcgatttacgtgattgtaaaagggaaacttgtgtaacaaagagacagaagagttcctcaaagttatttgtcctcaagtacagattaccaaaggtgatatggacaacgtgagtatatgccacctacggaaaatgtcaagttggaaactttataaaaacgttcagtcagaatatccggaacgtttgtgtaacaatgtgggacaact

SEQ ID NO: 5529 - DNA, 347 bp, Cyanidium caldarium
  unsure at all n locations
  Clone ID: LIB190-068-Q1-E1-F7
aattgnccggccgacccacgcgtccacccacgcgtccgggcaatgcaatttgccaaacaatatgaagatgccgtttttggtttcatttccatgggttgtattggagaacccaactttatttattttactcctggagtaaagttggaaaaaggaggggactcgctaggtcaacaatacacagatcctaagacagttataggcattcaaaagagtgacattgctattgtaggaagaggaattattcacgcctctgatcgaaaagaagccgcattgacgtatcaaaaagcctgttgggatgcttatgtccaacgaattgggaaataaagcgattgttgcctgttggttgc

SEQ ID NO: 5530 - DNA, 450 bp, Cyanidium caldarium
  Clone ID: LIB190-068-Q1-E1-F8
attcgcgggccgacccacgcatccagtcattcatttcgaataagatggagtggttctttcaggctcgcttagaaagtgtttgcgtccaaagagacaaagtttttgaacaattggccaaagttcgagagttgagaagaaatcttggcgtccttctttcaaaagcaccttctcacgtacaggtaaacattggctgtgacttttatcttgacggcgagttggatgacgaaggtcttttacttattgacatgggaaagaacgtctttgtggaaatgcaaccacaagaagctctagagactacaatactgagagaaacttggctggagaggctcggtgaatattatacgaaaaggatcggagagctggaagggctgcttcaagtatatcgtgtggaataatagaagtatgtaatcagtattgtcgccgcaatatgtatataacagtatttgttgt

SEQ ID NO: 5531 - DNA, 262 bp, Cyanidium caldarium
  Clone ID: LIB190-068-Q1-E1-G5
acccacgcgtccgccttatgtttatcctacactgcagccatatccaccttatacgccgtattattcctccagttattctacctatacacaagacagtggattctactttcccaattattcaggacctgttcaaatctaacctctgttttcctaaatgctggaaccaatgagagtttccttttccgataatgtgttgggttttgtttcttctttttcgataaacttctgtggtttggatttgttattaaaaggttaagtacag

SEQ ID NO: 5532 - DNA, 443 bp, Cyanidium caldarium
  Clone ID: LIB190-068-Q1-E1-G6
aattcgccggtcgacccacgcaaccagtgcagcatgctcggggaaaacctctactggtgtatctcggacggtaactagaggagtgaacctaagtggagcagatttttcgggacaggaccttagtggtgtcagttttcaacagagtctattaagagaaaccgactttcatgggtcgaaattggtttcagcctccttctttggagcagagttatcctatgctaatttggaagatgcggatctttcagaagctaatttagagttggcaaatcttcgtaacgccaagcttaagaatgctattttacgaggagcatacttttcaggaaatacgcgtttagagaatgctgatatcgaaggtgctgatttttcccaagttattcttagaaaggaccaaaagaagtatctctgcagtattgcgaaagggataaatagtcatactggcgtcg

SEQ ID NO: 5533 - DNA, 466 bp, Cyanidium caldarium
  unsure at all n locations
  Clone ID: LIB190-068-Q1-E1-G7
ggtaccgtatctagaattcgccggtcgacccacgcaaccgcccacgcgtccgaggaggaggaggaggatggcagaagagaagacttgggcaacgagatcatagaccaggagatgaaaaagctgctattccgtggataccggatgatgatgatgattgtagtttgcgtgaaagagaagagactgcttgttgtgcccaatggaggtggattgcgtccatctccaacgaaatgagaaacaacccgcgttggttcaagtgctttgacaatccttttgcaggtagtagacctttttgtagcttgaaagagttggaagatgcgttgggtacggaaaaattgatgctcgtgatgcagacgtttcattggctgaccaaccagttgccgcaacgaatgtgccctatttcgcctagtagtagcangacgaagagaaagccgagtctgttgtttttcaacaactagaattggttggc

SEQ ID NO: 5534 - DNA, 193 bp, Cyanidium caldarium
  Clone ID: LIB190-068-Q1-E1-G9
accacgcgtccgcgtattattcacaaatagataaggaagtagtcgagtctatggaagtttccgagagtgtttctgggtttcctgcagagacggagaagccttatagaattccaaactttacaccattgactcaagacgactttgacgaagacttgtggttttccatggaataaaagtatagttttttgtaaaa

SEQ ID NO: 5535 - DNA, 338 bp, Cyanidium caldarium
  Clone ID: LIB190-068-Q1-E1-H11
aaaatctcactgttgcttgtattatttgtggcgtattttatggacgttgtgcgatgatttttggtcttgtatttcatcggatgcataaacgatggagtcgtctggtttccatggatatggatgaagccacgatgtaaataggagaaagtataaaacaataatatcaggacgtgaggatatcgataatataatatttggcaatacaaaagacaaaataaggtaaaataaaaaaaaaaggaagaagcactacaaggatacaagcttacgtacacgtgtagcgctacagtaataacttcttccagaatgacacgtttaaccatgattcacaaaaagggggg

SEQ ID NO: 5536 - DNA, 440 bp, Cyanidium caldarium
  Clone ID: LIB190-068-Q1-E1-H6
ggccgacccacgcatccacatgcaagtaggtaaagcgaacgggtgagtaaagaggtgtgaaagagtggaagaacatgaaagcacagaagaatgtaagaaatggttagagtaaaaaccataaaggaagtaaaagcgggaatctgagaggaggaaagccacattggaactgagaaaaggtccaaacaagagaagacacagtaaatgaggagtggagtaaacagaaaaggaagtaaaaggagggaatgaagggaagttatggcaaaaacacgtgccagcagcagcggtaaaacgtgtgtagcaagcgtagagcagaagaactgggtgtaaaggtcgagtactagagtaagtgtaaaagggaaaggaaaggagagaaagaggaaagggatgaaatgcagagatctctagagaaacgcaagacagaaaagaaaggaagacacagt

SEQ ID NO: 5537 - DNA, 446 bp, Cyanidium caldarium
  Clone ID: LIB190-068-Q1-E1-H8
attcccgggtcgacccacgcatccacggacgcgtgggcgaagaagagaagatagagaatccgacgcgaccccttctgcaagtgtttccttagataatggaaactcggtttcgaaagatatgaaagatatgggaaataaagaggtccatcgagatttttccagtactgaccaggaacaagttacattgcaagagcgtgttggaacatttcatcgagtggaacctccatagattggcgagtctttgaggggaggaaatgcaccagctcatgtggagaatgtcgttgaacctagcaaccacttttcttatccaagtttctatccagagaatatgccatttcccacaggatatcctcctcctcctatgacttcaggagtatggccatatccgtattttccagttccgtatttcggacaatcctttgcgcctacaaagaatgactatagca

SEQ ID NO: 5538 - DNA, 242 bp, Cyanidium caldarium
  Clone ID: LIB190-069-Q1-E1-B1
ggtcgagccacgcgtacgagacaggaatcttttagaggagctgagcagttggtacggtgaaagcgatccttctcagtgggtgcatcgacaaaatctccatggtaccaaaacgatacaacatttgcaacaggttctttcttctcaaccggcagaccgagaacttgggaagtgtgcaactgtttccgaggaagacatgggacaactagagggtcagcgctcttgtgaaaagaccagtgggaatg

SEQ ID NO: 5539 - DNA, 435 bp, Cyanidium caldarium
  Clone ID: LIB190-069-Q1-E1-B10
tcaggaattcacgggtcgacgcacgcgtcagctgtgaggcgtgttgcgaagcgttgtcgttatcgtctatggcggtatttgaaagtgatatagttggtcctgcaattcactttacgaaaaagtataattcaaggaggcgctacaaggagtgcatttcgtgctttagtgcttcgggtggtaaaccagggtggttcttttgacataagccgaaaattactcgcaacgggctatacgactgataagggtatgaagaccaataatggtgctgttcgagaaagtgacttttacgagagagtcttttcaagaatagcttcaaagcgctctgacttttggaaagaagtttctgtaaccttagtagtctctaccattgacaccgagtcggataaggttatttcagtgtggaacgcgtttgttaccaaagaccgtcagttgttc

SEQ ID NO: 5540 - DNA, 448 bp, Cyanidium caldarium
  unsure at all n locations
  Clone ID: LIB190-069-Q1-E1-B12
aattaacggctcgacgcacgcgtcagagccgatactcgctttgagtctattcacgtcctcgtattcgtcttggtttccttatactgtcctaagaaaaaatcattctattaaacaatatcgtggagtcgcttcagaaacgtcgtaaaataaagacagaaggcatggcaggggtgtcacgtgcaaagcttcgtcttatgacagacttgaggttgatgaagcaagagcctccagagggttgtagcgctagtcctttgagtgacgacaacttgttcgtttggggtgccactatttttggcccccctgatactgcctgngaaggaggtatctacactttgcgactaacttttagtgaagagtatcctgataaaccaccgaaggtccgttttacttgtgatatgttccatccgaacgtctaccaagacggtaccctctgtttggacattattca

SEQ ID NO: 5541 - DNA, 214 bp, Cyanidium caldarium
  Clone ID: LIB190-069-Q1-E1-B2
ggtaacggttaggaattcccggctcgacccacgcgtacgcttttttggcgcgcaatgaagagccgatttgcggttcctatgcagttaaatgcgtaattacaagttgtcacgagatatgaaaaagggacaatgtcgtttttgggaatatgctgtattttaaaacattggctagagctagtttcgaatactaaaaagtagttgtgaaactgttgtg

SEQ ID NO: 5542 - DNA, 294 bp, Cyanidium caldarium
  Clone ID: LIB190-069-Q1-E1-B3
ggccggtcaggaattaccggctcgagccacgcgtcaggtacaatgggagagtccatgtcggagaaggaaatagtttcacgttatcagacactgaaacaacaaattcagcaaataatgttaaaaatagaagagtttgaaaacgacagaagtgaacaagaacttgttttgaaacagttgctgcctttgaacgaacatcgtaagtgttggagacaacgtaggtactgttcctaatgagcaaacggttggacaagtacaaccagtgttggcagccacgagtaaagacttgcagcaagc

SEQ ID NO: 5543 - DNA, 448 bp, Cyanidium caldarium
  Clone ID: LIB190-069-Q1-E1-B5
ggtaccggttaggaattcccggctcgacccacgcgtacgaaagatatcaaaccacaacaacaacggagaaagaagaagatccctctcccttgggaatgctttccacaagttttccttcttgtgagaatgaaatgacatctagtgattgtttcggtggtggtggttgtggtggtggcatcgacgataaatctcgaatagtatacagtatggaatggaagatagaattgatgcggcattggacattttatgagtccttgatgcacagtcgtttgtttgttagtcactttgctacttggaagcagcaaggtcaacgagatgttttagagttgttggctatattaggaattcccttgaaagatgccaaacagacatggaatcatatgaatgtgagatgtaaacgtttgttgcaatcgaaatttccagttgcatgtcgtcattttggattgta

SEQ ID NO: 5544 - DNA, 378 bp, Cyanidium caldarium
  Clone ID: LIB190-069-Q1-E1-B7
gaattcccggctcgacccacgcgtacgcccacgcgtccgtatatcattcgttatgccttttccaaggagttttgtggtgaagagtatcttcctgacgatattctttggagacaaaaagaacagttttcggatggcgtgggctatagctggatcgatggtttaaaggcgtattgtgaaaaggccgtttccgatgcagacttgcaaaatgccgctcagcgttttccgcacgatactccaacaaccaaagaggcatatgtttatcgagctatattcgaaaaacattttgggaattgcaaggcagtacaaggtcttcgtgaatcagttgcaagatgggtacctatgtggagtgacagcacggatcctagcggtcgtgcacaa

SEQ ID NO: 5545 - DNA, 333 bp, Cyanidium caldarium
  Clone ID: LIB190-069-Q1-E1-C6
cggctcgacccacgcgtacgcccacgcgtccgcccacgcgtccgcggacgcgtgggttggtctgaatcttggagtaagcacaggatcgacattccgtacgttgtttgctgctctcgtatttcatcaattctttgaatgatttgctgtctgtacgaatgtttccgaagcccactttggcacttgaaccactatagtaatggtactttgctaggctttggaaactccaatccgtatatctattggtattggtattgcacacacttatcatgaaaactcctcggcatcggtgttaacgagaggcattttggatgccatcccccgtggaattttaac

SEQ ID NO: 5546 - DNA, 447 bp, Cyanidium caldarium
  Clone ID: LIB190-069-Q1-E1-C7
ggtaccggttaggaattcccggctcgacccacgcgtacgcggacgcgtgggggaccaaacagagtgacaagaagagatggcaaggagaatattgggtgcttatatgggagatgccacagtggcaactctgttcagtatcaaaatgttgttctatcttactatcatgggtttctccataactatcttggctctcatgggaaagaactcggatggtatttggatacatagtgtgccacctgcagatcaatattgtgcatacaagtcttcattggaggtgaaccaccatggaattgcttcctattgcaagtatatcgttgccgtagctgctattgggttggttatctcgtttttccagttttgctacggtctgttgggtatctttttcaagtggcaacaaaacgttgtggtaaattaaggatgcttccaatctatttttctgggcttggt

SEQ ID NO: 5547 - DNA, 425 bp, Cyanidium caldarium
  unsure at all n locations
  Clone ID: LIB190-069-Q1-E1-C8
ggtaccggttaggaattcccggctcgacccacgcgtacgcagaaaagctgtaaaatagtggctttaataagtgaattgaaagctattgaacgttgtcggatgggatcgggtgactacgaaggactcaagactgtaggaaagacagttattttctctcagtggacgagatatttagatattttggagttggcattacaagacaatggcttgcattatgtccgacttgatggaaagttgacttgtaagcaaagatcganagtcntgtccagtttcaggttggaccagtcagattccatgagtagtgcaaacattttgcttgtctccttgaaagctggttgagttggtttaaatcttaactctgcaagtcaggtgtttatatttggaccatggtggaatcctgcagtggaaagaacaagctatcgata

SEQ ID NO: 5548 - DNA, 316 bp, Cyanidium caldarium
  Clone ID: LIB190-069-Q1-E1-D1
acgcgtaagacgaagacgacaacaactcatccaatacacgcacctgccaactgtcctggaacagactctgaaaaggctggaaaagcagaagcttgtgagggttgtcccaatcagtctctatgtgctagtggaaaaagtactcaactggaccctgatatacaactcatagcttctcgtcctgcgaataataagcacgtaattttgatattatctggtaaacgcggtgttggaaaaagtacatttgctacccaattggcttttgcgttggcaagtagagaatattttgtgggtttactggatgtagatatttgtggac

SEQ ID NO: 5549 - DNA, 443 bp, Cyanidium caldarium
  Clone ID: LIB190-069-Q1-E1-D10
aattaccggctcgaggcacgcgtaagcaatagtgggaattttgtggaggagatgcctttggtgtgtccgggacatagtcgaggtattgtacagttggaatatagtccggtcacagtagatggatattttcttattagtgcctgtttgggtatgtttatgttcgttgtcttagttgctcaacaaacctgtcatagatggctatccaatgttgcgagacggtgcaacgggcaactggttgggaacttttcatggtcacaagggagcagtgtggtctgcttccttaaacaatactgcgacattagcagttactggaggagcagactttacttgtagaatatggaacgctctcaatgggctttgtttgagaacttactctcagccgcacatttgccgagctgtttctttttcggaggatagttacaaagtgcttgttggagggaata

SEQ ID NO: 5550 - DNA, 321 bp, Cyanidium caldarium
  Clone ID: LIB190-069-Q1-E1-D12
agcacgcgtcagcccacacgtccggtctcaacaagtttactaccaatgccaaaagtataaggaggttactcagcaagaatgccagtacgtccaagagtcgtattgtgtcgagtatgaagaatgtcagcaagttacccaggaagtttctccttcagaaattgtctactacggtgaatcttcttctagcagtagttactactactagaacacttgtgaaatgcgcaaagtcgcaaagtagagtgttcttttttgaataaactgtgactttttgtcaaagaaaacaaataagggggaaaaccccagtaaggacgcctataaggt

SEQ ID NO: 5551 - DNA, 354 bp, Cyanidium caldarium
  Clone ID: LIB190-069-Q1-E1-D3
cacgcgtccgcccaagcgtccgcgttaaagcatgaaagaaaagaaatccgaaaaagaacacaaaaacgtaagaaagaggaccgaatcacggtaagaggtacaggagcaagaagagaagagagaatgctgggtggagtagcgaaacacgacaagggaagtaaaacgtaacacagacgaaaggtttacgagagaacgaagtacaaagaagagagtgtaccgcggcgtcataatacaaatcccaaacgagtccaacacaagcgagacaaccaaagacacccacacaaccgccgtactgaacacccacacaggtaccccaggacaaacgacacccaaattaacgtgacagaattgacc

SEQ ID NO: 5552 - DNA, 367 bp, Cyanidium caldarium
  Clone ID: LIB190-069-Q1-E1-D4
ggctcgacccacgcgtacgtccactttggtttcgtccctcgtccctcgtcgtctcctccaacgagtaccaaaacataaaatagaaaatggcaactttactatccaaaaaaagaagagcagtagccgacggtgttttcaaagcagaacttaacgagtttctgatgcgagaattgtccgaagagggatactctggtgtagaagtgaaacccacgccgttgcgaacggaaatcgtgatccgagctaccagaacacaaaacgtgttgggagaaaaaggtccaacgattatagaactcactgcgttggtacagaagcgattccgttttcctgaacgaacagtggaactttatgcggaaaaggtttccgatag

SEQ ID NO: 5553 - DNA, 334 bp, Cyanidium caldarium
  Clone ID: LIB190-069-Q1-E1-D6
ggtaccggttaggaactcccggctcgacccacgcgtacgggtcttccttggtcagttagtgaagaagaccttcgtgaaactttttccaaatatggagaagttgttgatgcaagggttgttgttgaacgtgaaactggtcgttcccgtggttttggtttcgtatcctatgcagaaggttcctccgtaaacgaatgcattgccgcactggatggcaaggatatgcaaggacgcactattcgtgtgaacaaggcaatgtctcgtgaacaacgcgagagtggaggagactttcgtcgcggtggtcgtggacgataccgacgttttcgttccggtcctt

SEQ ID NO: 5554 - DNA, 325 bp, Cyanidium caldarium
  Clone ID: LIB190-069-Q1-E1-D9
cggacacgtgggcggacgcgtgggcggacgcgtgggcggacgcgtgggtttcttggtagcagttgtacattcaacatcatcaaatgccaaagggaggaaagaaagattcttcaaagaaagaagccacaagtaaacctgcagcagcagatgctacaaagacgacagaaaagtctggtccggaagccaagttgaagggaactggtgcaaagaaacaataaaaagttgactatgcatgttcctgttatgttttgtgagttctgtttgatagtttccagctattcttttggtagtgaataaagagaaaattttttatatttacacaaaa

SEQ ID NO: 5555 - DNA, 416 bp, Cyanidium caldarium
  Clone ID: LIB190-069-Q1-E1-E11
gcgtcagaaaaaaaaacaaaaaaaaaaaaaaaaaaaaaaaaaaaaaaacaaaaaaaaggaaaaaacacaaaaaaataaaaaacttacgtaaacgtacatgaaacattcaattcttctgcaaaggtgcctccaaactttcatttccctcgccgtcctttaaaaaaatcgggcccccccccaaaggtttccaaccttatttcccgcgcaatccatctcattaccccttttaagggccgccctaatttcattccagggcccttttttttaaaatccctaacttggaaaaccctttgttttctccccttaacccccttttctcaatccccccctttccccacttggctttctctccctcggccccccccttttcccctcccaacctttttccccccccaattgccaatggcccctcccct

SEQ ID NO: 5556 - DNA, 442 bp, Cyanidium caldarium
  Clone ID: LIB190-069-Q1-E1-E12
aattaccggctcgacgcacgcgtaagcggacacgtgggcggacgcgtgggggaaattcttggagacaaagtggagaaggtggtagtttccgaaagacttgcggaatctccatgtatccttgttactggtgagtttggttggtcggccaacatggaacgtatcatgaaggcacaagctttgcgtgattcgtccttggcaatgtacatgtcatcgagaaagataatggaaattaatcccaacaatgccatcatgcaagaattgcgtcgccgtgtggaagcagacaagtcagacaagaccgtgaaagacttggtcaatttattatttgacactgcattgttgacttccggattctctcttgacgatcccaacgtttttgcctctcgtattcatcgcatgattaagttaggtcttagcattgacgaagatgaagtcacagaaaaga

SEQ ID NO: 5557 - DNA, 449 bp, Cyanidium caldarium
  Clone ID: LIB190-069-Q1-E1-E5
ggtaccggttaggaattcccggctcgacccacgcgtacgacgtgaatggactcgcaaagcaacaacaagagcagtagagataatgcttcacacgaccgacaaaaagcgaaagatgttcgtctttcgaacatttccgcttcaaaagcagttgctgacgctgtaaggaccagtttgggtccgagaggactagataaaatggtgcaggaagaaggtggagacgttttcatcagtaacgacggagcaacaattttgtcaaaaatgagagtggagcatccagcagcaaagatgcttgtggatctctcgaaagcccaagatgttgaagctggagacggaaccacgactgtagttgtcatcgcaggctcgctattaagtgcttgtcttactctacttgggaaaggggattcacccttcattgatatcggatgcgttccagtttgcagtggagaagg

SEQ ID NO: 5558 - DNA, 446 bp, Cyanidium caldarium
  unsure at all n locations
  Clone ID: LIB190-069-Q1-E1-E6
ggtaccggttaggaattcccggctcgacccacgcgtacggaacgatccaccaaagggttgtgagttcttccgtgcacaagttattattcttaaccatcctggagaaattcatgcgggttatacgccagttcttgattgccacacaagccatattgcttgccgttttgcagagttggagaagaagatggaccgtcgctcgggtaagacagtggaagagaatcccaaggctatcaagtcaggagatgctgctatggtgaagatgattccatcgaagccaatgtgtgtggaaactttcactgaatatcctcctttgggacgttttgcagtgagagatatgagacagacggttgctgttggtgttattaaggaggtggagaaganagaagtagaaggaaagactacaaaggcggctgcaaaagcgcagaagaagtaatctttggttgctt

SEQ ID NO: 5559 - DNA, 449 bp, Cyanidium caldarium
  Clone ID: LIB190-069-Q1-E1-E8
ggtaacggttaggaattcccggcctcgacccacgcgtacggacttcttgggtcagcaagtttatgaacaactccagaaagtatactcggatactgaaagcgttttgatgaagttggatcctctcgcgaagttgttgggaagaaatcttgaacgattatggaggagcgatgttcctatggagcccgagccttcccagatggatattgtttccaccagaactgatacagacgagatggaagtaacagagcgtaaaggagttgtctcagtacgacaaggagagtttgattggatggaattcttgaaaacatattgtgatttgacagagtctgaagcaaggctatgttgtgatacattgaaattgatgagagaacaagagtttacatcagttgatactgcaatattagaacgcctgggtattgaagattcaaggactaggctcaaaattgttg

SEQ ID NO: 5560 - DNA, 443 bp, Cyanidium caldarium
  Clone ID: LIB190-069-Q1-E1-G11
aattcacggccgacccacgcgtcagcccacgcgtccgcccacgcgtccggtcaatcttgctggtatggtcgctgcaaatattttacgtggtgatgttcaacagacgcattggcttgagcatgaagagtggttaaacgtgacggagacaaacaaagttaaagatgaggaatgtattttaatcgatgttaggaatcctgaggaagtacagtccgaacctgtaccgaatgcacagaatattccacttcgtgatattcgaagtcagcttgataagttaccgaaagaaaaggaaattgctgtgttttgccgctcggggcagcgttcttatttggcatccagaatgttaagtcagctgggttttcatgtgaaaaatatttcgggtggctttctttcttatcgagatgtgaaggcaagtgccgaaattcgttagtggacgttgaaccttg

SEQ ID NO: 5561 - DNA, 432 bp, Cyanidium caldarium
  Clone ID: LIB190-069-Q1-E1-G4
cccggctcgacccacgcgtacgagcatgctgaccctacgcgcacttgggatttacagtttcttaccttgtcaagtaaagttgttttctggacatggaaagaaattatcttccaaatatacacacaagtttcggtaccataatatttgtatgaaaggttctggaaggggagaggaagtaagtagtatcgcgcgtttgcaacaacagagtagaagagtttttcttatttctgtggcgcaatttgcgatattgggattagtgagacccaaagaagcagtcgctgctgaagagagctttgcaaaaatctggacaaggagggtttttaaaagctggttacaatactcccgaaagtttaaccagtgaaacagttcaaatcgatgccgaggctatgaaagacccgcaagtaaaaaagggactggagaatttgagagctt

SEQ ID NO: 5562 - DNA, 444 bp, Cyanidium caldarium
  Clone ID: LIB190-069-Q1-E1-H10
aattaccggctcgacccacgcgtacgggcgtatatacaactgacgaccgatcatctcctgaaaatgaagaaagcaagatacttgcagcaactggttcctatggatggctcaaaacattggaaggattgtgcgaaaggctagaagcatcctgtacagaaaccgaaaaccaaattagtgcaacagaaaactctctaaacagagagccgccagagctccttttgaaagtgtcgaagaaagactttccgaaacagcagttgacgaggcttcaaatttccatgaagcgattgaaaaacttttgtcgactggaagctcctttgtcgttggtacgaaagaagatcagcgtttgaaagagagttagcttctgaactggaatattggatatcttgtttgaaggaagagttacaaacgatggactctcacatagagtcgctcgagagactatct

SEQ ID NO: 5563 - DNA, 446 bp, Cyanidium caldarium
  Clone ID: LIB190-069-Q1-E1-H11
aattcacggccgacccacgcgtcagcatttcggcagttgtacagtttcagttcacttcgcattaaccatgttttccagtttttacaaacctatacctggggagacaagtctccgaactggagtgtacgaaaacagcagtgcatcgtttcccaagcttccctccttctccaagctttcgcgttcgtctccttcttcattttctctgtcttcagtatcttccaaaagtgtatcctccaaaagtccgtcttcgaaaagattgtcttctccaagttcgtcttccaacagaccgtcttccccaaggtcaccttctagtcgttcatccagttcttcagactctttgcctgatatttccgccagagttgaaaaatatttctcgaagcacaagaagaatatatttgaagtgggtagactggctgttaggttaaccagagagtattatcctaatg

SEQ ID NO: 5564 - DNA, 341 bp, Cyanidium caldarium
  Clone ID: LIB190-069-Q1-E1-H2
tcccggctcgacccacgcgtacgcccacgcgtccgcttaaagatccagatcgaatttgatccagaagagaaaagccgtactgaagaccgacacaggtactcgaggagaaaggagacccaaattaaggtgagagaatggacgataaggaactaggcaaaaggatatggtatctgcggtagaacatatgaaagaagcagcaccgactgtttagcaaaaacacagcactctgcataaaagagaaaatgtaaagcgcgtaccttttgcataatgtcccatcgagtgaaagaggaagcaaaaatcatgaacatctcagtatccaggtaagacccgaagcaaaatgg

SEQ ID NO: 5565 - DNA, 364 bp, Cyanidium caldarium
  Clone ID: LIB190-069-Q1-E1-H3
gacccacgcgtacgcggacgcgtggggtggaagaaagtttcgagaagaaatgcttcaagccaaagcttcacactctaccaacatagaactccatgttggcgatagatgctttgttgcgcctaataaccgtgttgcaacagttcgttacgtcggaaagcttcctgttcatgaagctgaaacagtgtttgttggagtccaatttgacgaacctgtaggaaagaatgatggcagttatcaaggacattactattttcactgcgaaccaggatatggaagttttgtccctttgaatagaataaccaaaatggaaactattcattcagagagtgaaaataatacttttgaagaattgtaatgatgagag

SEQ ID NO: 5566 - DNA, 374 bp, Cyanidium caldarium
  Clone ID: LIB190-069-Q1-E1-H6
cacgcgtacggaaaatttaaagccgaaaccgcgagagcattggcaacgtggtctcattatcgttttcggcaacgcttgttacagaaatcgagagaatatccttggtgccgagtaattatagtgaatgaagcttatcccagcaaaacctgtagaatgtgtggacagatagattccaaactaagaagataggaagattttcaactgtccgcattgtaagaaacgttgtgatcgaaatatccatggagctcgcaagaacttgttgcgcttcttgggcaaaaaacggtaattcctttaagtttccaaaatgtggtcagacaagaattaccgggttagtgcgagtaagacagtagacatttatttacttacaacaatac

SEQ ID NO: 5567 - DNA, 435 bp, Cyanidium caldarium
  Clone ID: LIB190-069-Q1-E1-H8
ccggctcgacccacgcgtacgcccacgcgtccggaattatttgagacaacagatgaacaaaattcagtcaggcaatgtattgcaagtagaatggagaggtgcatctccgtggttggcagattatcataatagcaactttcaagctgctcgttcggcatttcaaaaagtgtatcaagttgatccagacttgaccagagaaggtggttctattcctatcacgaatacttttcaagaatatttgggaagagaaatttgtttgatgcctttgggttctcccgatgatggagcgcatagtcaaaatgagaagatgaacaaactcaattatatacaaggaatcaaagttattatagcttatatgaatgaacttgtcaattgctagactcttttcccgctatattccactctaataatataaaaggataaagttgttcttgg

SEQ ID NO: 5568 - DNA, 455 bp, Cyanidium caldarium
  Clone ID: LIB190-069-Q1-E1-H9
cggtcaagaattcacggctcgacgcacgcgtcagcttttcttttccatgaaaagatggaaaatgcgatttcctatgatccattaggaacatcctcttcttctcctcgacctcatgccaccaccacattaatgctatatcttcagcaagtcaatggtctatatcaacaatccgtatcattgtgtgagaccatcgacgacaaagaacccgagtcgcaatgccgtacatttcaaacgagtctggtggcaaacaatttttttggcaacatcatattgtccacttgtctcatcggggcaacctctggcaattcgtttggaagcaacttgaatatcccaccttataacagtaccaagggaatagatggctatctttggtacatcgtggcagccggaagctttgtgatatggtggtcattccttgccttgtttatattcaaaaacagatcgctattaaacta

SEQ ID NO: 5569 - DNA, 295 bp, Cyanidium caldarium
  unsure at all n locations
  Clone ID: LIB190-070-Q1-E1-A5
ccgggtcgacccangaatccacccacgcgtccgcccacgcgtccggaaaagccgtactgaagaccgacacaggtactcgaggagaaaggagacccaaattaaggtgagagaatggacgataaggaactaggcaaaaggatatggtatctgcggtagaacatatgaaagaagcagcaccgactgtttagcaaaaacacagcaatctgcagaaaagagaaaatgtaaagtatagagtgtgcggcctgccaaatagtagagaagaaatcgatgaaagtgaaagcgagtaaaagattaa

SEQ ID NO: 5570 - DNA, 376 bp, Cyanidium caldarium
  Clone ID: LIB190-070-Q1-E1-A6
aattcccgggtcgacccacgagtcaaaagaaaagttgtttgaggaccaaacagagtgacaagaagagatggcaaggagaatattgggtgcttatatgggagatgccacagtggcaactctgttcagtatcaaaatgttgttctatcttactatcatgggtttctccataactatcttggctctcatgggaaagaactcggatggtatttggatacatagtgtgccacctgcagatcaatattgtgcatacaagtcttcattggaggtgaaccaccatggaattgcttcctattgcaagtatatcgttgccgtagctgctattgggttggttatctcgtttttccagttttgctacggtctgttgggtatctttttc

SEQ ID NO: 5571 - DNA, 382 bp, Cyanidium caldarium
  Clone ID: LIB190-070-Q1-E1-A8
acccacgcatccaagcactgtggccgatggtgctttcccatacgagaagactgcttccaataggcttttatcatactggaatattaagacagacaaaatttatcaaccaagaacagtcctcaaccacctctagtatacctagtgccgaggatactcctctccatatcgacgaaagctgtgtccagcgcttgagatatgttagtagccaaaggggaggaaaacctgttgctttaagagtagcagtggatagtggaggatgttcaggctttcaatatacttttgagttgaccgaggaacagccagcagagaacgaaaccgtggtggaaagaaacggttgcaaagtatatgtggacgatatttctctcccgcttttaaagggaag

SEQ ID NO: 5572 - DNA, 413 bp, Cyanidium caldarium
  unsure at all n locations
  Clone ID: LIB190-070-Q1-E1-B5
aatgcccgggccgacccacgcatccagaaagaggaccgaatcagggtaagaggtagaggagcaagaagagaagagagaatgctgggtggagtagcgaaacaagagaagggaagtaaaaggtaagaaagaggaaaggtttacgagagaaggaagtagaaagaagagagtgtaaggcggcgtcataatagaaatccgaaaggagtagaagaaaagagagagaagaaagaaaagaagagaaaagccgtactgaagaccgacacaggtactcgaggagaaaggagacccaaattaaggtgagagaatggacgataaggaactaagcaaaaggatatggtatctgcggtagaacatatgaaagaagcagcaccgactgtttagcanaaacacagcactcctgcagaaagagaanatgt

SEQ ID NO: 5573 - DNA, 347 bp, Cyanidium caldarium
  Clone ID: LIB190-070-Q1-E1-B6
gacccacgcatccacggacgcgtgggcggacgcgtggggaaggatataatcgggtttcctggaattgctggcagtggagtgagcgctggagaacgtgcagtagaagccctgttaaacgaaaccctatatgttaatgtagatctcagggactttccccgttttgatggggaagattttaaacccacgcttttaaagaagattagcaaaaaaaaaaaaaaaaaaaaaaaaaataaaaaaaaaagaaaaaagcacaaaaagaataaaggaaaaagtgcgtatggtcacaaagttaaagctcttgaacagcgtcacaggaaatcaaatcaacaacaggggtggccccccaa

SEQ ID NO: 5574 - DNA, 366 bp, Cyanidium caldarium
  Clone ID: LIB190-070-Q1-E1-B7
aattcccgggccgacccacgcatccacccgtttatctcttttctttgtatggaagctgcgctacgatatttcttgttgtggagtcgggttgtttggtagtacagccttaattttgtgggtgttataaatcatccaaggctaaatacgtaaagagagaccgacagaaaagtctggtccggaagccaagttgaagggaactggtgcaaagaaacaataaaaagttgactatgcatgtgtaagtatttgtggattttccagtagaacaagctaaagttgtttctgaaggcagtcctgttatgttttgtgagttctgtttgatagtttccagctattcttttggtagtgaataaagagaaaattttttat

SEQ ID NO: 5575 - DNA, 395 bp, Cyanidium caldarium
  unsure at all n locations
  Clone ID: LIB190-070-Q1-E1-B8
aattcncgggtcgacccacgcatccaatttaagaagttattgaccgatgctttgattgcttacttagaaccgatacagacaaaatatcatgaattacgaaaggaggaatcctatttgaaacaagtgttgaaagaaggaagcgaatatgcttcgtcgatagcacaagaaacgataggcaaggtgaaggattgcatgggttttgtgggaacggattgaaaaggtttccaagatattttgtgtttgtgcgtgtgtatatgcgcgcaagcttttggtggtgactcgtggacacatggttgcaagttgccaggggttttttaggtcgatcttttccgttggggtgttgctctctatcgtagaatagaaagcgcgttttttttggataaaggcacaacaac

SEQ ID NO: 5576 - DNA, 260 bp, Cyanidium caldarium
  unsure at all n locations
  Clone ID: LIB190-070-Q1-E1-B9
cacgcgtccagaggagaaaggagacccaaattaaggtgagagaatggacgataaggaactaagcaaaaggatatggtatctgcggtagaacatatgaaagaagcagcaccgactgtttagcanaaacacagcactctgcagaaaagagaaaatgtaaagtatagagtgtgcggcctgccaaatagtagagaagaaatcgatgaaagtgaaagcgagtaaaagatgaggtatagagaatggcggtcctaacaataaggatc

SEQ ID NO: 5577 - DNA, 385 bp, Cyanidium caldarium
  unsure at all n locations
  Clone ID: LIB190-070-Q1-E1-C1
acgcgtccaaccgactgtttagcagaaacacagcactctgcagaaaagagaaaatgtaagtatagagtgtgcggcctgccaaatagtagagaagaaatcgatgaaagtgaaagcgagtaaaagatgaggtatagagaatggcggtcctaacagtaaggatccaaaggtagcgaagtaaatagacgtttgaaaggcgtccagtatgaaaggagaaacgagtgtagcactgtctagtcgtccaactcagcgaaacagcaataactgtgaaaatgcagtaaactagcagtatgacggaaagaccccataattcttgactagataggtttacggangagagagaatcatgaagtanangaagtggggtaagagatgaaagaccactgca

SEQ ID NO: 5578 - DNA, 372 bp, Cyanidium caldarium
  unsure at all n locations
  Clone ID: LIB190-070-Q1-E1-C11
acgcgtccaaccaagcgtccgcccacgccgtcggccaaccctccggccaagcctccgggggtaggctaagaacaacaatccaaagaaggaaacgttaaagcatgaaagaaaagaaatccgaaaaagaagagaaaaaggtaagaaagaagaccgaatcaagggtagaagtaaaggaacaacgaagaaaacaaagaatgctgggtggagtaacaaacagaaaaggaagtaaacgtaagaaagaggaaacgtttacgagagaaagaagtagaaagaagagagtgtaaggcggcgtcatantagaaatccgaaaggagtacaagatcagagagagaagaatgaatagaagagaaaagccgtactgaagaccgacac

SEQ ID NO: 5579 - DNA, 422 bp, Cyanidium caldarium
  Clone ID: LIB190-070-Q1-E1-C2
aaagcagtagcaaaaggtttaaaacgtcacaagaacctttcagtggaaaacctccgtatatatcctattccgagtagttttgtgccacctctttctcctgcctctaccaataatcagaagaggtcaagggattttgagcataatttgtcgaataacctggtatatggagagtttccgccacttatgaggcgtttatgtcacgaacatagcagaatgaatatgaggaggatgaagtcttcctcgtccttcgagcacatcaaggatgtgagagagaatagctgcgaacgctgccaaatgatgactagttggatggtcgctattagacaagctgttcttacggcttcaacgcttccgttcgatccacgctatcattatgtatcatatagtgtagatagacgaggtattgtattctgcaacgaaac

SEQ ID NO: 5580 - DNA, 390 bp, Cyanidium caldarium
  unsure at all n locations
  Clone ID: LIB190-070-Q1-E1-C6
aattcncgggtcgacccacgcatccagaaaaagtggtggatgaggggcatccggatgatgtcgttccaggtgaagaagaagagaatgatgatggaatgggtaataataaggatacacgtacgagtaaccgtaggatggcaccttatcaagtggtatcagtaggtggcacgtttgatcgtctgcatgcggggcatcgtttattattgagtgtaacagcgtggagttgtaacgggcacttacggattggcgtgacaggaccaaagttattggagcacaagcagtggaaggagttgattgagccttttgaacaacgagttgccaatgtggtttcatttgtaaagagcattcgtcctcgagacttggtcgtgactgccgtatagttgcacgatg

SEQ ID NO: 5581 - DNA, 350 bp, Cyanidium caldarium
  Clone ID: LIB190-070-Q1-E1-C7
aattcccgggtcgacccacgcatccagccacgcttccgtttgttgcgaagtatagcggttggttacgaatgcatataaaatagtattcagattgttatgggaagttccttcaaaaatctcttagtaatagatggacgggctctttgtaattctcaaactaagtgagatcgtctcatcgtacacacttcagagttacgcttcattagtgaagtgtgcctagtattattcatgtgagcgaatagcttccgagagatcgtaacttgttcatgagtacttgttacatctggattaacatgtgattagatggttatattaacatagtatcactcactagttatgtgatatcgaca

SEQ ID NO: 5582 - DNA, 407 bp, Cyanidium caldarium
  unsure at all n locations
  Clone ID: LIB190-070-Q1-E1-C9
gccacgcgtccaggctgacagaaaaccacggaataggtgagaaattctatttagacagatggagacgcaaaggagactttgactcttattggaccgttacgagaattcaaagagataacaagggagatccttccaagttctttggttactatcactacaagggtactgacttgaaaggagaaagagaaatcgaactcgccaattgtaaaggttggaggtgcgatacacttgaaaaggagcgcaccaaattgtttggtaaaacaccgacagttccttaaaaaaaaaaaaaaaaaaaaaaaaaaaaaaaaaaaaaaaaaaaaaaaaaaaaaaaaaaaacaaaaaaaaaaacaaaaaaaaaaanaaaaaaaaaacaaaaaaaaaaaaaaaagggggggcccctctaaagg

SEQ ID NO: 5583 - DNA, 402 bp, Cyanidium caldarium
  unsure at all n locations
  Clone ID: LIB190-070-Q1-E1-D11
aaagagaaaaagtaagaaaaaaggaccaatccagggtaaaaggaaaaggaccagaaaaaaaaaaaaaaagcctggttgaattaaccaaacagaaaaaggaaattaaaaggtaggaaaaaggaaaggttaacaaaaaaaggaagtaaaaagaaaaaattgtaaggcggcgtcataataaaaatccaaaaggaatagaagaaaagagagagaagaaggaanagaagagaaaaaccgtactgaagaccgacacaggtactcgaggagaaaggagacccaaattaaggtgagagaatggacgataaggaactaggcaaaaggatatggtatctgcggtagaacatatgaaagaagcagcaccgactgtttagcaaaaacacagcactctgcagaaaagagaaaatg

SEQ ID NO: 5584 - DNA, 390 bp, Cyanidium caldarium
  unsure at all n locations
  Clone ID: LIB190-070-Q1-E1-D6
aattcncgggtcgacccacgcatccaaagcggcacacaaaaacgcttggttatccacgtcacgtagattcgcaagtggagtcagcggtgatgttattggaattgatttgggtacaaccaactcttgtgttgctattatggaaggaaaaaatcccagagttattgaaaacgcggagggttcccgtacgacgccttccgtcgtagccttcactgcagaaggggaaaggctggtgggaacgcctgcaaaaagacaagctattaccaacccagaaaatactttttttgctacaaaaagactgatacgaagaagatttgacgacccagaagtacaaagagatgtaaagacgatgccctacaagatagttcgagcggataatggagacgcttgggt

SEQ ID NO: 5585 - DNA, 348 bp, Cyanidium caldarium
  Clone ID: LIB190-070-Q1-E1-D7
gacccacgcatccacccacgcgtccgaaaaaaaatggataaaaaaaacaaaataaaataaaaaaataaaatcagaaagtgatattaaaggaaatgaaattgagtacaaacaactcttgtgttgctattatggaaagaacaaaatcccagagttattgaaaacgcggagggttcccgtacgacgccttccgtcgtatccttcactgcagaaggggaaaggctggtgggataccctgcaaaaagacaagctattaccaacccagaagatactttttttgctacaaaaagactgataggaagaagatttgatgacccagatgtacaaagacatgtaaagactatgccctac

SEQ ID NO: 5586 - DNA, 440 bp, Cyanidium caldarium
  unsure at all n locations
  Clone ID: LIB190-070-Q1-E1-D8
aattcncgggtcgacccacgcgatccaatatggtatctgcggtagaacatatgaaagaagcagcaccgactgtttagcaaaaacacagcactctgcagaaaagagaaaatgtaaagtatagagtgtgcggcctgccaaatagtagagaagaaatcgatgaaagtgaaagcgagtaaaagatgaggtatagagaatggcggtcctaacagtaaggatccaaaggtagcgaagtaaatagacgtttgaaaggcgtccagtatgaaaggagaaacgagtgtagcactgtctagtcgtccaactcagcgaaacagcaataactgtgaaaatgcagtaaactagcagtaggacggaaagaccccataattcttgactagataggtttaaggaagagagagaatcatgaagtanaggaggtggggtaagagatgaaagacactgca

SEQ ID NO: 5587 - DNA, 308 bp, Cyanidium caldarium
  Clone ID: LIB190-070-Q1-E1-D9
cacgcgtccaaccacgcgtccgcaacatcatgcaactgtcttaatataggctccttgatgatgctgccatcgggaaacattcttctacgagtatctatctttctagcaagttcctcatcttcatactgtcgtttgatgaaataacggggaagagtttcattcgatgcccataattgttttaagagttgttgcgtgtcttcactcaaggaagctacatagtcttcttctacgatgtcaccgaaatgatagatacttaaattggaaatgtgcttgtgtaagccttgaataaaactgagagcttcggtacc

SEQ ID NO: 5588 - DNA, 406 bp, Cyanidium caldarium
  Clone ID: LIB190-070-Q1-E1-E5
attcccgggtcgacccacgagtccatgtgatatcaatatcatggacgctggtcaatgggaattgtttgcaaaagatgccaatgtgtctactgcaggctattctcaaggcataagtaatttgagcaaatgtttctcttccgataagagtgcccaatacttttggattgccgcttatgcattgacaccttcccaactaaaaatcaagttgccttataacaacaccgatgtggaacgtatcaatgaagtagctacccaaggattgaatcgtagtgcttgtgtactgaatgcttatgatattaccgtcaatgcctttaatgatacgaaacaagcaactaccgatggaattcactatctaagatggatcaacgaacaagttgtacaattgttcctcaatgcagttgacaat

SEQ ID NO: 5589 - DNA, 416 bp, Cyanidium caldarium
  unsure at all n locations
  Clone ID: LIB190-070-Q1-E1-E6
acccacgcatccacccacgcgtccgcccacgcgtccgcccacgcgtccgcaagtaaataaataagcaacaaggcaacggctgtgacaagaccaatcaatccatatgctccataaaaggaataagaagaatattttttcacagtcacaaatgtattttctatggaattcaaaacattatccatagtacttttgaagtccgttgcttcctgttctatctcttgcattgcttgtaatatgtcagaatatgcaggataactggtatttagttgggcctgaagaccttgagaagaaaaggtctgttggaaaaaattagcagaggcagtcatccaatgaatggaaccatcgagagcattttcgtcgtgaccaaaactctttacangcacatgctttcctagaaagccaaatgctgcaccaca

SEQ ID NO: 5590 - DNA, 416 bp, Cyanidium caldarium
  Clone ID: LIB190-070-Q1-E1-E8
acccacgcatcaagatgactgcctcaagtcttctatctttgcagcgttgttttttcggtgtgatttcttccattcctaaaacttctcgacatacgaatctttatacaaaaaactccatccaaagtgttgtttcactttgcagagagagaaactttactagttctacagaaacttcgagtgtcggtagtcgtttcaagaacattctcgtagaagcccgtagtgaccgagtgggtttaatcacgctcaacaggccaaaacaactcaatgccatcaacgaggagactcaacaagaagtgcttcaagcgttggaagagtttgatcgcgatcgttctataggagccatcgtcttgactggaagtgaacgagcgtttgctgctggagcagatatcaaagaaatgggcaatcgcaactttgtg

SEQ ID NO: 5591 - DNA, 368 bp, Cyanidium caldarium
  Clone ID: LIB190-070-Q1-E1-E9
acgcgtccacggaatttgaaatggaaagaagcacttcgatcaagcaaatggagtctgtacagagacaagtaagagaacaacattcgaaacaagagcaggatatggaaatgcagacttgcaatgaaagaagagataaaagagcgaaaagaaggtcgggaactttacatcgtggcagtcaagaggaattgaaatagcagtcgtggatattgtagaccaacttgtatttgttccatgttgttatcgtaggtttttagaaacattcacctttatttgatcgcctgtgcctgtttccccatgaaaaaccctctgtaaagaaaaggtcgataaaattctctggtgccacaatttcccaaaaaaaaaaaacacac

SEQ ID NO: 5592 - DNA, 386 bp, Cyanidium caldarium
  Clone ID: LIB190-070-Q1-E1-F11
acccacgcgtccggaaaagagaaaatgtaaagtatagagtgtgcggcctgccaaatagtagagaagaaatcgatgaaagtgaaagcgagtaaaagatgaggtatagagaatggcggtcctaacagtaaggatccaaaggtagcgaagtaaatagacgtttgaaaggcgtccagtatgaaaggagaaacgagtgtagcactgtctagtcgtccaactcagcgaaacagcaataactgtgaaaatgcagtaaactagcagtaggacggaaagaccccataattcttgactagataggtttagagaggaaagaggtgtatgatgcaggcaaagaagtgacgcagtagattagagagtaacacatgcaagtaggtaaagcgaacgggtga

SEQ ID NO: 5593 - DNA, 445 bp, Cyanidium caldarium
  unsure at all n locations
  Clone ID: LIB190-070-Q1-E1-F6
aattcncgggccgacccacgcatcaagtttcgtctactcacgaaaagtattgcaccagttactaaaagcattttgttatccacagtaaagtataatagtcctttgcagctgagtaaagcagagatatggagagcttcttatccaattggaagcagacgttcctttgcagaacaaaaggcacagcagcagtccaaagaaggtgaagaaccaataacgccttatcaacctgtgacggagaagctggataaaagagacccaaactatccttggaagtggagaagttttcttcctgaacatacctacaaacccaacctcaatatcaatctggaaaggcatcatacacctttagattttagagatagggtagctcggggaatcgtcaagtttttaagattttttgcggatgccttttttcagaaacgatacggacaacgcgctgttgtgc

SEQ ID NO: 5594 - DNA, 360 bp, Cyanidium caldarium
  unsure at all n locations
  Clone ID: LIB190-070-Q1-E1-F7
acccacgcaatccagtgtggtggtggtgactggaagcgtacgaggaagcattgtcaggtgttggggtttttacaaggcttttcgtataataaaccctcttgtgttgctgtttttggtcgaaaaccacagttgtgtttctttcctcggcaaccatggacaagttgtaaaagaagagggagcctanggatagtagctactgcgagtacaaccagcaatagcaataatagtattcaagaccacaacaacaacaataataataataatggtaacattttattcgtattgtaaacgaaggttcctcacatgaacganatataaactaagtggtgttatggcactgaaccaagaaaacgtcgaaca

SEQ ID NO: 5595 - DNA, 378 bp, Cyanidium caldarium
  Clone ID: LIB190-070-Q1-E1-F8
aatgcccgggccgacccacgagtcaagccacgcgtccgtcggattcctcttctgttgatgcatcgttgccttctggggaaagacgttcgaagtcagtgagaagaggattgtcgctttgcaatgcgtcgtttaacaacttggccgcaagtttggcgtcttgagctatttcttgttcaagaagaggacctcattcaactttccactgggatgggcgttccaatgcttgctgtacggtaactggaggattattttgcccacacaaatgatacaagtgaagtgctaaagatatgcatctgagtaaacgagtaaagtatggcttatattcgttggccgcagataacattaagtaataatattcctcgtttcctggtccatatt

SEQ ID NO: 5596 - DNA, 377 bp, Cyanidium caldarium
  Clone ID: LIB190-070-Q1-E1-G5
acccacgcatccagaatttggtttgttggacaaagatgaggaagacgcggttctttagtaacaattttaggaaaagtagctaccggagtatgggctcaaaaagggacaacaagggtttgttctctatgatatatcacgggttgatgtctgctctttttctgcttggtggtctaactcttgttggtgtgggaatatatgctgaagtaactcattctggaaagtttgacttggattggacgagtagcttttggagtgctgtgacgaactttggaatagctgccatcatagttggagccacgttggcagttattggagctattggttttgtaacatttaactctggtttttgtgggaaattcttcaagttgatgtatttc

SEQ ID NO: 5597 - DNA, 418 bp, Cyanidium caldarium
  unsure at all n locations
  Clone ID: LIB190-070-Q1-E1-G6
aatgcccgggccgacccacgagtccacattgtgcagagtcatggtcgactgccaaaaagacggttatgcaataggaaagttatgattccattttgccgttcaaataacaatagcgagaaggagaggaaggtcgctcctgtagatagagaaaagaaggtggttggagttggtatggccggcttggattttattgccaaggttcacaagtttcctcagccagatcagaacataagaagtgtacaacatagcattcagggaggcggaaatgctgcaaatactttgacttgtttgaggagattaggtgtaaacgctgttctagtaacgaaaattggtagtgactttgcgtctcaatccattatcgaagagttggaacgtgaagacatggatacangtttcattacaagacaagatggtgctc

SEQ ID NO: 5598 - DNA, 345 bp, Cyanidium caldarium
  Clone ID: LIB190-070-Q1-E1-G8
cgggccgacccacgcgtccacccacgcgtccgcggacgcgtgggcggcttcggtatctgcacattatattcatcgagccgagtcttcttcgtctcgacgtgcagttagcatttttatgataagattggcggaaagtgtgatgaatcgagaacgaagactggcgggttgaaagaaaccatgtggaaagtattattcctactactagtgacacagtggttattcgtgtcaagtgtataatgtactgtatagtggatacaacgtcaactatcacctccttgttcagctatatagtagatcacattgatttctgaggaatgacaaattgtgagaagcaaagtcaatgga

SEQ ID NO: 5599 - DNA, 280 bp, Cyanidium caldarium
  Clone ID: LIB190-070-Q1-E1-H1
acaaacgacctcgatgttggatgacaagcaatggcatcatatcttcaccttgtggttggaagaagagcaacttttatcgatgagtaaccaccaacaatatcgtcgtttattggtgaaaacatatctccaaaaaattcatcagttacaacaagatatacaatatctatccaaactgtataaaaccattcttcctacttgaaaaaaaaaaaaaaaaaaaaaaaaaaaaaaaaaaaaaaaaaaaaaaaaaagaaaaaaaaacaaaaaaataaaaaaaataaat

SEQ ID NO: 5600 - DNA, 392 bp, Cyanidium caldarium
  Clone ID: LIB190-070-Q1-E1-H11
gggccgacccacgcgtccacccacgcgtccgggcctattctatggcttttgctttgcgtggtctagcgagtctttcaagtcgtttgagtacttggaaacagggttacaagattgtaactgttgcaaataattttgaacgagaaagaggactgcgactggtgagttccttccaaagtgcgcggcagtggacttcgttgcaaggtttgttatgtcgctatagaagtgacagcgttgtggagggagggaaaaagcaaaagggagtcgctactgaaagaagtcctgtttctacagccattcccatgggttatgccgatgaatatttccatcacgtgcatcgttggcgtccaggagatccaagtaaacgaacggtagtctatttgtggttgggaact

SEQ ID NO: 5601 - DNA, 417 bp, Cyanidium caldarium
  unsure at all n locations
  Clone ID: LIB190-070-Q1-E1-H5
acccacgcatccacccacgcgtccggtggccacttggcgcattcgttgtttccgctctccaaccaaagtcaccttgtcgttgtggcttgaaatattccacttgtaagaaaccttatcgtatagatattttacgaatatccaaacctagttgtttgaataaactagaccttcgagcttctcagcaaaaaaaggactcaaagaactccaagttattggctttcgaaacgaatggagatgttctcaagtttggagtcttggttactagtagttgccttttttgttattggttcctattacaagtatttcgagtatctgaacaaacagctggactggtgactactggattgttaactatctttggaatgggactttggacctttcgtatttttctcgcggtgctaatanagagatgacata

SEQ ID NO: 5602 - DNA, 408 bp, Cyanidium caldarium
  unsure at all n locations
  Clone ID: LIB190-070-Q1-E1-H7
aattcgcgggtcgacccacgcatccaacaattcaaatgttatctcctgcctttaaagtcagagatatgtttgaatttctcaaggcttccttcgaatggaaaagtcatgagaagcaaactttcttatggaagttgcttctcaaggacatttctaatcacagtcatatggaacaggtgttattgtgccatgaattccttttgcaggtgcgatcggaactggcagtttttttcattatcagccagcagagccgtttttaatgtgttttctgactggatcatattgcaaactcccaatatgggaatattatttactctctttgaattgggagaaacgtttcaggacanagtttcngacattctttgtagttggctcgtcaaacctggcaagcgccaggaactcattcaatta

SEQ ID NO: 5603 - DNA, 431 bp, Cyanidium caldarium
  Clone ID: LIB190-071-Q1-E1-A11
aattcccggctcgacccacgcgtacgcccacgcgtccgcggacgcgtgggtggaaatggaagatgctcagcgtcgaaagtcgttgcaaggtttgaccaggcaacagatttcggatattgtggaagcttgtgcagcttatcccaacattgacttgagttttcagttggtctgtgaggaaagcgaatcatcggaagtggtatatccaggttccacgataagtttggttgcgcagttaacacgagaagaagaagaagaggagacaggagataaacaaggacaagatggcgacctcgttcatcatcctattgcttacagtacgcgctttccagaaaagaaagaagaaagttggtggttattagtcggtgaattgggagctactccaacacttgttgctatcaaacgtctcatagtcaagggaggtggaaaaaaga

SEQ ID NO: 5604 - DNA, 346 bp, Cyanidium caldarium
  Clone ID: LIB190-071-Q1-E1-A2
attcacgggtcgacgcacgcgtccggaatggagaccacccacagctgcggcattttgccaagtttcgtttcaagtgggttccaagtacaacttgccaaacagttatcttctgttattcattcaggaaataaatgtccatggagaaaatgttattcgaaaaatgtccctcgtgttcgttccattccaacaactgtagttgcaagttacaactacaacatatttcaagacgaccaagatcgttcgagaagaagaatacaaccaagagaaagagcctacaacgtaaaaaagccggttggtttggtagtggaacaagcagaagacggaatggtatttgtagcggatatag

SEQ ID NO: 5605 - DNA, 366 bp, Cyanidium caldarium
  Clone ID: LIB190-071-Q1-E1-A4
tccagaattcacgggtcgacgcacgcgtccgcaaagttagtcaattggcgttgtgatgtcagtgactatgcgattttgggttacagtttggaataagttggtgtgactttggtcttttctgcccttcagtcgaagtattggagtagttttcggcttgtacggaagagttcagtgcacgttcatgaatgtatttttgcgttcgtttattcgtgcactggcctcccttgtgtttacttactacagaatttcgccaaatatgggggttgaacaagctttgcccgtggcttgccctatagtaagcgaagttcttagttgttggcaagttttctgtacgagacctgactggagtctgggagtggcgactct

SEQ ID NO: 5606 - DNA, 318 bp, Cyanidium caldarium
  Clone ID: LIB190-071-Q1-E1-A7
ttcccgggccgacccacgcgtccaattgtcgtcgagttggcgcttggcactagttgtagatgtggcacagacagtgggaagttgtatgtacagagacttggacgccgttttacagaggatacttggcatatcggtggagagtgattcttcaacgtttccgcctcgtggcggaccgcgtgactcggagttttacttgtagagtgtttctttttacacttttgtattttatcagttgttacttgcgtcgactaggtgcttcacgacttgtaacaagtctccgttgtgttgtttcaacggattttcggcctcctttttatc

SEQ ID NO: 5607 - DNA, 270 bp, Cyanidium caldarium
  Clone ID: LIB190-071-Q1-E1-A9
cggctcgacccacgcgtacggcgaacgggtgagtaaagaggtgtgaaagagtggaagaacatgaaagcacagaagaatgtaagaaatggttagagtaaaaaccataaaggtaggcttagaagcagcaaaccagagaggaaagcgttaaagcatgaaagaaaagaaatccgaaaaagaagagaaaaaggtaagaaagaggaccgaatcacggtaagaggtagaggagcaagaagagaagagagaatgctgggtggagtagcgaaacaagag

SEQ ID NO: 5608 - DNA, 303 bp, Cyanidium caldarium
  Clone ID: LIB190-071-Q1-E1-B11
gctcttatgcatatggagtttttattttgaatggatttgactttgacaagtgttatggaacagaactaggtgctatatcgggaatcgtcattttattttcgtatcttgccttatttgttcgtttttacgtgaatacttataagaagaaacaagtattggaaaagaaagaatcttgaaacctctttctacgtatgagttgttgttgttgttgttgtgatgggaggaaatgttaccaccaccccacacacacaagttgcaataaagcacttgaaaattttttgggttgaaaaaaaaaaacaaaaa

SEQ ID NO: 5609 - DNA, 67 bp, Cyanidium caldarium
  Clone ID: LIB190-071-Q1-E1-B2
tacgtcgaaattcacgggtcgaccacgcgtccgatctatggaagtaacgaagaacgagtttatagaa

SEQ ID NO: 5610 - DNA, 370 bp, Cyanidium caldarium
  Clone ID: LIB190-071-Q1-E1-B4
gtccagaattcacgggtcgacgcacgcgtccgcccacgcgtccgagagaacagttaccgatagttccaaaacaacgaatggggctgctgctgctcccaaagagaccaaactcagttccatttttagtggtcaaagtacggattcgaaaacaaatactactagtgctagttccaggacagctagcagaccagcgaaaaccaatgaaaagatggaaactccgataggaagtgcaaagtttggtttcttatcttcccgaatgaaacctagtggaattggtaccactcctactactagtaccgtgggcagtagcttatccccaaagaatcaagcacgtccaagtacgacaccaagcaataagaaacatttagaa

SEQ ID NO: 5611 - DNA, 447 bp, Cyanidium caldarium
  Clone ID: LIB190-071-Q1-E1-C11
ccggttgggaattcccggctcgacccacgcgtacgcccacgttggtaaagatagacttgtctcaaggcagctttaaagtactccaagactgtgacagagatttagaatgtgatcataataccaagtttcagttggaacttattcagtatggtctcttttcacctggtttttggacgagagaaaatgttctgctcttctatttggagctcgtgtcaggtgtattcataagggacactctctaccttttctacaacaaaggtgaagaacatttgtttgcgagtttaatgctgttgttggagacacaagtttcactgtatgcagacataaaaacaaactgggagaaacgacactttatcgtttgcctcatcgtcaggtctttgtgtgaggaatatcaacgacagtattcagagctatgttcaccgaatgaaagcacgaaagatatgctac

SEQ ID NO: 5612 - DNA, 325 bp, Cyanidium caldarium
  Clone ID: LIB190-071-Q1-E1-C2
attcacgggtcgacgcacgcgtcggttgttccatgtggaggagggtgggctttttgtggctggggtcaagcctgtgagagaggaagatggagttgatttgggagaagtagtggaggatgtcgtgagtgactagtgcatcctttgcaattgggaacaggtccgtgtggggagaggaggaggtgatagctttcatgtcgtcgagtgaggcctacggtagcggtagcactgttgtacagcgagtggaatagtggcttcaggagggactccatcccaaatttcctcaagtaaatcgagcgttcgacgagctcacggggagtcatgtcag

SEQ ID NO: 5613 - DNA, 334 bp, Cyanidium caldarium
  Clone ID: LIB190-071-Q1-E1-C4
gtccagaattcacgggtcgacgcacgcgtcgggcaaccgtcaagtggagcaacgactggttggttgttggtgaaggagcacaagtgttgcattgttgttcaatactgtttgtaatagtagcagtgagagtagcatgacgagtagtaacagtggtagtgctcatcaacaagccaaggattgggtggagtccagtagcaaaaatgagtggacagagcctgcagctgctgtggcaggaactttggcctccttgggactgataagaatgtagtctaatggacctgtatataaaaattccgtcgacttgaagggcgaagtaggtgtagtgacaggtgcc

SEQ ID NO: 5614 - DNA, 385 bp, Cyanidium caldarium
  Clone ID: LIB190-071-Q1-E1-C6
taaattatggcggaccatgatcaagtggtagcgtacaagcgttcagaagaagaaaaatggagccaagcaggtgaaaaaagatggcagttattcagaagactggaaaaagagaatgctactgcccgctttttcttagaaaacagagctatttttccaggtgctagagttttggaactggcttgtggttccggagaaaccactttgcaagtagctgcgaaagtaagaggctattctgtaccttcaggagagaccacgggggaactggtggataaattgttggagatattacgtccatcttatcagcaggaagggaaactggatggtgccagcaatactggttcggtagtaggtgtagatatcgccaagggaatgctgaatgtgtgca

SEQ ID NO: 5615 - DNA, 444 bp, Cyanidium caldarium
  Clone ID: LIB190-071-Q1-E1-D11
ggttaggaattcccggctcgacccacgcgtacgcaaaaacctgatagttggtttagagcttatcctttacaggaagacctatttgagtggcactttactataaagggaccagaaggtactccgttcgagggtggtttttatcacggaaaaatactgttgccacctgaatatcccttcaagccacctgatatcgtcttgctaacaccgaatgggcgttttgaaacaggacaacgtatctgcctgagtgttagctccttccacgaagagacatggcaaccttcttggagtatttactccattctgttaggccttcgttccctttttccttgcaaggcagaaggagttggagctctccagtgtgaccctcaagttcagagacgcttggctcgtgcatctctgaagtttcactgcagacaatgtaatttctccttatcgacgtttaaa

SEQ ID NO: 5616 - DNA, 443 bp, Cyanidium caldarium
  Clone ID: LIB190-071-Q1-E1-D12
aattcccggctcgacccacgcgtacgcccacgcgtccgcgaagtcgtcaaaagaagagaaacctagagagtcgaaacttcatacggttcctaggtcggaagatggttcgtttattatgcctttacgattgggtgttttaaccatcgagtcattgggttatattgatccttatcgaaaaggttttcacaatgaaagagtaatttatccgattggttttcggtcaaggcgtcattttacttcaatgatgaacgttgatagacagtgtgactatatatgtgaaatagtggattgtggatatgattatcccatatttagagtaacttgtgaagatttaccggatcaagtttttgaggaaacttctgcttctggttgttggagccgaattctcaagattattacagaaagaactcctgaagaacgacgacgctcacatgtttcggtgt

SEQ ID NO: 5617 - DNA, 311 bp, Cyanidium caldarium
  Clone ID: LIB190-071-Q1-E1-D2
gtccagaattcacgggtcgacgcacgcgtccggcaatgaggaaacgttgggatcggtggtgatcacaggggatagaatatcgttgggacagcagacacacacaaatacaatccagctttacttttcatcctgcgcaacagcatccttttgtggatcaacagacttgggagattgtgcacagctagggcaacctagtcatggcattcacatacgcgtgcaccgaagctacaactatatccgtatttgccgcactaccagtggaggaaggactgtctgtttctcctcgaatacagacagttacttctcccaat

SEQ ID NO: 5618 - DNA, 323 bp, Cyanidium caldarium
  Clone ID: LIB190-071-Q1-E1-D3
attcatgggtcgacgacgcgtccggatttgccatgcctgctgcgtcgaggttggcagcgacagatgctagtgtgggtgaaagatccaagtctatgatgagaatagatggaaagttggtttcaggtaggaaggaaacccgcaagatagtggacgactgtttagacgtgcgcaggagtggggcaggggtcgatgagtaagttggccgtggcagtgatcatacaaggttcagttactgaacttttcgttgcggctcgaggccgtggaagttcgttcacgaagcatttttgaaagtcacgccagcggttgggagcaagaacttcaaa

SEQ ID NO: 5619 - DNA, 356 bp, Cyanidium caldarium
  Clone ID: LIB190-071-Q1-E1-D4
gggtcgacgcacgcgtccgcggacgcgtgggttgttgcgcggtctggtggtgatgccctggattgagctacgtagtggcaactccgctgtcgtgaaagacataactgcaagtattgagaagcctgacataaaatggataactaggacgaatctcagtacttgtcggaattctgcagaaggaaatgttacggttgacttgtcgcggcagtgtagcttgaaggatatattttcattgaagcttctcgacaagaacgtgaagttggcgtgttttaatgatgccttgtgtttagttttaccaggcttgagcctttgttattactggtgggcggagagtctgtagaggctcgggcttgaat

SEQ ID NO: 5620 - DNA, 387 bp, Cyanidium caldarium
  Clone ID: LIB190-071-Q1-E1-D9
tgccaaatagtagagaagaaatcgatgaaagtgaaagcgagtaaaagatgaggtatagagaatggcggtcctaacagtaaggatccaaaggtagcgaagtaaatagacgtttgaaaggcgtccagtatgaaaggagaaacgagtgtagcactgtctagtcgtccaactcagcgaaacagcaataactgtgaaaatgcagtaaactagcagtaggacggaaagaccccataattcttgactagataggtttagggaggagagagaatcatgaagtagaggaggtggggtaagagatgaaagaccactgcatgaggataaggaatctaactgagtaaggaaaataagcttaagctagtttggctggggaagtaaagcctaagaaagagt

SEQ ID NO: 5621 - DNA, 441 bp, Cyanidium caldarium
  Clone ID: LIB190-071-Q1-E1-E10
tcccggctcgacccacgcgtacgtgcatttttttcttggtgtgtcatgggaagaagaggtggcagtggtgctgctagaagaactccgctaaggtcaaaacctcccctttttgcaaaaagagaaagggaagaagcaacaacgaaacagtcttcacgtcctgcgtcttcgctggccaacgtgaagaataatcctacgagtggaaaccaaagagagaagaccaaccaaacgacgacccctccaactcagaagcctagtatgacctcttctctttttgggggaatgctaggaagtatgctccccatgtttttatttatgaactggttcaagaggaatcccgaggaaagggaaccagacaaagatgagatagctcagaagaagtgtcagacgcttgcgtgcaatattcaagattgtttggaaaaaaacgactatcagcaaagtatg

SEQ ID NO: 5622 - DNA, 454 bp, Cyanidium caldarium
  Clone ID: LIB190-071-Q1-E1-E12
ccggttgggaattcccggctcgacccacgcgtacgcggacgcgtgggtgttggggtagtggaatgaaaaacggttgtccttgatgaaaaagtgtcaacttccggttctccctgaagacattgaatctcaaattctggaattattagagtatgtaaaggatgttgctgttgctagaatggtttgtaagcgatggaagagactcgtggatgaaaattcccaattgtggagacgacttcaaggctttacactaccaaaacgactaccaagtgaagcggaaaagtggtatagaaaggcagcggaatgtgggaatcgagaggcaatggtgcttcttgccttgctctattattatggatatcagagtcaggatgccacagttttgtctttgacgtttcttcgaaatagtgtcgcttgttagtgcaacgagcactagtgtcgttgttgaggtatttataaa

SEQ ID NO: 5623 - DNA, 355 bp, Cyanidium caldarium
  Clone ID: LIB190-071-Q1-E1-E3
gtccagaattcacgggtcgacgcacgcgtcggcaggcgtagacaagcaagctcaggaggagagaagtagaggaaatgagtagtttcgcaatagacagtacaaggaggcatgcgagtgttatactgttgctcgtagtaaagaaatgagtacagaagaccgggcagcgtgttttgcgaagagagctgcagcaaagctaaagttggaagactatcgaggggctttggaggattgttccgaagctttgagcttggatgaaggctattggaaaggaaagtaccgacgaaaggaatgctatttcgagctgggtcgtgatgagggagctttgaaagatgcaaagggcacgaaggagaagcac

SEQ ID NO: 5624 - DNA, 331 bp, Cyanidium caldarium
  Clone ID: LIB190-071-Q1-E1-E4
aggtaaaattcacgggtcgacgcacgcgtccacccacgcgtccgcggaagtgtggcaggcgggagagggtattatagttagcaatgaaaggtggacagagattagtccagcgggtaggaagattgaactcgtgcgcgtatctttaccggcgaatattcgttctatctaggaagttcaggggagtggccagccaagtccggcagccaggaaacgggagaaggcttcctttgtagtggatcccagtttggtcgttgcgtgagatgggagtgatttgtcgtttgttgttggttattggcagacactgaagtgggtgtaggctcaactcctgata

SEQ ID NO: 5625 - DNA, 435 bp, Cyanidium caldarium
  Clone ID: LIB190-071-Q1-E1-F11
ccggctcgacccacgcgtaagggcatgcagctttgttactccgcttctctacaacaacaacaacaactcctatgttcactccaggctgaataagaacgtcgccactccaaagtttaactgcacacataataaagtctgtgttgtcagttgctccaaagatcccaccagtcggaatacaactcgaagggaagcaattggaacactgttttctactgctgcattgagtattactattcccttgttacttgccgagaaaccaactgtggacaagccagaacaactcagaaaggatgttgagtctctcaaatacgacgaagagctcatcttgaatccagaccctgccgaaaaagatcctcttaggtatcagcctccgccaaaggaacctgaatatcgcaaacaagaaaaagagcttatcaagtccgacgaagaaaaata

SEQ ID NO: 5626 - DNA, 250 bp, Cyanidium caldarium
  Clone ID: LIB190-071-Q1-E1-F2
gtccagaattcacgggtcgacgcacgcgtccagggatttgttgcgaagaggttcggtgcagatgttgcgtcgtggtccggggaggatactgcgacgcatattatcagcgggcgactaattatgaagacacggataacaatccgcattcgagtcgttcgtgaattcagtttgttggtaggccttcagaattttcctgatgttagtagcttttcggatcgaagaaagcataataaaatgatttcctacagga

SEQ ID NO: 5627 - DNA, 327 bp, Cyanidium caldarium
  Clone ID: LIB190-071-Q1-E1-H3
attcaagggtcgacggacgcgtccgaccacgcgtccggagagggtgcgtgcttccgtctccacttcccgtcgcttaggtccgatggtaggagcgggtataagtggagcaacgctgtataaccatgtggatggagttacttcttttttcaaggaactatctagggccgccatgtatagcctgacgaagccaaacaaagcaaacgtggcttcgtctggtcaaggcgactctcaagaactacagtcgttggcggagcaaattaggcgcctttcaagagaagtatcgaggtcccgtgcagcagttcaagaaaagtcttcgagacaacctct

SEQ ID NO: 5628 - DNA, 425 bp, Cyanidium caldarium
  Clone ID: LIB190-072-Q1-E1-A10
ggtaccggttacgaattcccggctcgacccacgcgtacgcggacgcgtgggcaagtagaggatttattggaacaaaatggaatccagaataagcgtgtaagagaattcattttagaaaatttaaccacggatgatgttcatcctaagcactttaaatggcgcgtgaacgtttctgctttattgaattctatgaatagaatactcgaatttcctgtgaaagaagggaaaacatactctcgcccgacgctatttatccgaggagaaagatcaatttatgttatgaatccgtccgctgaaaaggctattcggacttttttcccaaaagcagtcattgaaacaattgaaggagcaggacactggttaaccgttgaggcaccagaaaaattttgtgcagttgtgaacagtttccttcataactcaactga

SEQ ID NO: 5629 - DNA, 304 bp, Cyanidium caldarium
  Clone ID: LIB190-072-Q1-E1-A2
agcccacgcgtccgcccacgcgtccgcccacgcgtccggaatatacgacagttttgctgttaagaagcagctgctgaacctttcatccatgatagcatcacagcttttgttagtagacgaaatacttcgagctgggagagatgttcgttcaaaatcaggcagtagtcaataaagctatccattcttcgtaaaaaaaaagaagtaaaaaaaaaaaaagaaacaaataaaaatcagatgaaaaaaaaaaaagaaataaaagggaggacgatcaagaggatggaagcttacttgcgcgtgcatggaa

SEQ ID NO: 5630 - DNA, 433 bp, Cyanidium caldarium
  Clone ID: LIB190-072-Q1-E1-A7
ggtaccaggttgggaattcccggcctcgacccacgcgtacgcccacgcgtccgcccacgcgtccgcccacgcgtccggcatttctgaagaagagttggatttgtgggcacaattaccaaattcaattcttgtatctggagacttggaatggaacttggatggcctacttgaaatgatgtgggagaaactcaacttgattcgagtgtatactaaaccaaaaggtgaacctgccgactttgaagctcctgtcattttacgcaatgataggaaacattgcacagttgaagcattttgtaataagttgcacaaaagtattatgaaggagtttaagtatgccctcgtttggggaagtagtgtcaagttcaatccacagaaagtaggaaaggatcatatacttcatgatgaagatgtcgttcagattgtgaaaaaaata

SEQ ID NO: 5631 - DNA, 424 bp, Cyanidium caldarium
  Clone ID: LIB190-072-Q1-E1-A9
acgcgtccaggtatcggttaggaattcccggctcgacccacgcgtacgcccacgcgtccgtccaagggttcgagagctttacaaacgttttctattgattggaaagcactatcctgagccttttccaagtgttaggcagaaaataaagagagggtttcaaaaaaatgctatcctttctgagaaacagtcgatagaagaaacacttcaacgtggggagtttgttctgaaggaagtcgaagccctcgtgcgattgcataaatacagaactttaaataagcgttatggaaggaataaatatgacaattgagacccaattcttctagttctactgttaccttggagaacaaagtttgggaacataaagctcggcgcagaattttgtaagtattattcctcaaaacatgattagcgaagaaagtgacta

SEQ ID NO: 5632 - DNA, 294 bp, Cyanidium caldarium
  Clone ID: LIB190-072-Q1-E1-B10
gtaccggtacggaattcccggctcgacccacgcgtaagggtgctgttagtcttcattggtgagcggatatgtctctgacagacatcctgtattgggtggacacagtagtttggaacaaacgcgttgaccgtccactatctgggacttgcttcattatatatttcagagtatttcatatagcttgtgccttctttggtattgctgactacatggagcgtcagcgcaagtacaggctgcatgaaagtgtcgacaagacctacctgcagttgctgccaagagttgtgttcaaacaac

SEQ ID NO: 5633 - DNA, 433 bp, Cyanidium caldarium
  Clone ID: LIB190-072-Q1-E1-B11
aggtaccggtagggaattcccggctcgacccacgcgtacgcccacgcgtccgtattgaaaatgtcaagtcgaagatacaagacaaggaaggtattcccccagaccagcaacgtttgatttttgcaggtaaacagttggaagatggtcgtactctctcagactacaacattcaaaaggagtctactcttcacttggtcttacgtctgaggggtggaatgcagatattcgtaaagactcttactgggaagaccatcactcttgaagtggagccctcagatactattgaaaatgtcaagtcgaagatacaagacaaggaaggtattcccccagaccagcaacgtttgatttttgcaggtaaacagttggaagatggtcgcactctctcagactacaacattcaaaaggagtctactcttcacttggtgttgcgttt

SEQ ID NO: 5634 - DNA, 442 bp, Cyanidium caldarium
  Clone ID: LIB190-072-Q1-E1-B12
aggtaccggtacggaattcccggcctcgacccacgcgtacgctcttccttatattctttgtgcttggacaatggttgcaaagactgctctgagttgcctctttctctctttccttatcgctgccgcagttgcagccgacgtagtttcagaggagagatggggatatgctcagcaaacccaacaacagcaacagtgccaacaagtatgtaaacagtatgcatactatcagagtccagtctgcacttccgtaaccacacagagcccatactggacccaatgctcgaagactgtgcaaacctttgtcccaagccagtgcagtacttatacccaatctcctacatggacctattgcagcacctacaccaccactagcgtaccatctcaatgcagcaaggccgtgactacctatactcaaacctgctgtgcttatgcccaacaaact

SEQ ID NO: 5635 - DNA, 408 bp, Cyanidium caldarium
  Clone ID: LIB190-072-Q1-E1-B9
ggtaccggttaggaattcccggctcgacccacgcgtacgcaacaacaaagcgcggatcgactgcaagattcgtctccagataagcttgtaaaagaacaggaagatagtttaagacgaaagtacggtaacttgccggacaaaaggcaccttctccagcaacgactcaaggcaaaccacatgcacgaacgaaaattttttgactctgcagacgcaactttggccaaacaaggaaaggaattggccgaagaagttggcgtggaacatgcctacccaacctcggaggatgagtgctcagacgctagttcacgttcaagtggcagctcctctagaaaccctcagaatttgactaagcatcaacaacacttggaaattggtcctactaaagcaaatccggataccgaagcctct

SEQ ID NO: 5636 - DNA, 427 bp, Cyanidium caldarium
  Clone ID: LIB190-072-Q1-E1-C10
taccggttaggaattcccggctcgacccacgcgtacgccaatgtggacgttgtgggctttgcttcagagaagcgaccatcgcggagtgaagactgctcaacacatcctttctttgtttaagaactctcaaaaaccttttaggagcaggaatatatctacagttgcctgccagccactttttggttccccttcttctgtcctagtttcctctcggcgagctgtctcggccggatcgaacttgttctcggtgagatggtttgccgatctgccttcgtatagcatcctaaagatgccttccttgtctccaactatgacacaaggcaatatcattgactggaaaaagaaagaacgtgataagctgtcacctgctgatgtgattgcacatattgagacagacatagctacaatgggatgttgagtgccaaga

SEQ ID NO: 5637 - DNA, 408 bp, Cyanidium caldarium
  Clone ID: LIB190-072-Q1-E1-C11
taccggttaggaattcccggctcgacccacgcgtacggggcgatattggttggtatgctgttcgttttgctctgagttttgtgggatatgataccaaagtatcttccgtatatgcgactgcctctaagacacacacaggtgcccttgaagattgttgtggcgttattcattttgcaactggacagacggtacacttcgattgtggttttacttgtggatttcgtcagtggggagagtgtgttggtgaaagaggaacagttactgtggacgactttatagttccatttacttgtggtggttctttcgttccaagagataagagcaaatacaacccgaacctcaagtttcgaatcaacaaattggctgttgagaaagataacaaattggagatgattgatcctgtcatac

SEQ ID NO: 5638 - DNA, 442 bp, Cyanidium caldarium
  unsure at all n locations
  Clone ID: LIB190-072-Q1-E1-C12
aggtaccggtacggaattcccggctcgacccacgcgtacgggaatagacagtatgagagtcgatggaaatgatctctgggcggtatatttctcggtaaaggaagcaaagcaacgtattttggaaaccggtcggccacttttattggagttgcttacttatcgaggaggacatcacagcaccagcgatgactcttctcgatatcgccaaaaaacagagattgaaatgtattccgagcgtttgagtcctttgcgtcgaatgaaacggtttttagagtttcgaaatcgttggaatgaagaaatggatcagagttatgtggaagagcaaagaagagaattgttgagtgctttggaagaagcagaaaaggctcccaaggcacctttggaagatctcttcaacgatgtgtacgatgagttgactcctcatttacaacaacanaagacg

SEQ ID NO: 5639 - DNA, 442 bp, Cyanidium caldarium
  unsure at all n locations
  Clone ID: LIB190-072-Q1-E1-C6
ggtaccggtcaggaattcccggctcgacccacgcgtacggacgacatgccaaagaacaaaggaaaaggagggaagaatcgtcgtcgaggaaagaacgacaatgaagaagaaaagcgggaactttgataaaagaagagggccaagaatatgcgcaagtgactcgcatgttgggaaacggacggtgtgaagccttatgtttcgacggtactcgaaggctatgccatattcgagggaagatgagaaagaaggtttggattaatgccggagatattgttttaattggcttgagagactatcaagacgaaaaagccgatattatactaaagtataatccagatgaagctagagcattgaagtctcaaggagaaattccagacaccacgaaaatcaacgaagaagagggtgaagaaggangggaagttacgtttgatttcgatgatgt

SEQ ID NO: 5640 - DNA, 413 bp, Cyanidium caldarium
  Clone ID: LIB190-072-Q1-E1-C9
aggtaccggtacggaattcccggctcgacccacgcgtacgcccacgcgtccgcccacgcgtccgacaagctatcgatagagtccatcgaattggacaaacaaaaacggttattgtaaagagaatgatagttgcaaacagcatcgaagagaatctcttaaaagttcaagaaaagaagaaattggttgccgattccacgttgggctcaacagaagtgtcgaaacaaagcagacaaattactgtcgaagatttgacgatgctttttcaggactgaatgcacagcttgtaaaaggcctaattgctgtcggatagtatggagttcgatcgcaacgacaccgtgaatattgttttggttgcgtgcaattctgtaacattcttcttaacttgctcttaaagcgaatagtttgcgttgcgt

SEQ ID NO: 5641 - DNA, 118 bp, Cyanidium caldarium
  unsure at all n locations
  Clone ID: LIB190-072-Q1-E1-D1
ccgggtcgacncacgcgtcagaattgaaggggtccacgtcggcgcaagtcatttccattctcgcccgcttttttcccacgacagctattgtctaccaagttggcttgttgtcccgttg

SEQ ID NO: 5642 - DNA, 377 bp, Cyanidium caldarium
  Clone ID: LIB190-072-Q1-E1-D10
taccggttaggaattccgggctcgacccacgcgtacgaaaggaaaggagagaaagaggaaagggatgaaatgcagagatctctagagaaaggcaagaaagaaaagaaaggaagacacagtaaatgaggcgagaaagcataggaggtgaaacggattaggaacccgtgtagtctatgcagtaaaagaaagaatgagtaagaaaaaagggagtcattccaccaggggagtaaaggcgcaagaaagaaacccaaagcaattgacgggaatcggaaaaaggggtggatcacgtaaattaatccgatataaaccgagaaccttacctctccaagaatgtgttgcacggctgtcgatagaacgtgctgtaattctgagagaac

SEQ ID NO: 5643 - DNA, 414 bp, Cyanidium caldarium
  Clone ID: LIB190-072-Q1-E1-D11
ggtaccggttaggaattccgggctcgacccacgcgtacgcagcgaaacagcaataactgtgaaaatgcagtaaactagcagtaggacggaaagaccccataattcttgactagataggtttagggaggagagagaatcatgaagtagaggaggtggggtaagagatgaaagaccactgcatgaggataaggaatctaactgagtaaggaaaataagcttaagctagtttggctggggaagtaaagcctaagaaagagtaaattaggcaagcaaaaacacgtgccagcagcagcggtaaaacgtgtgtagcaagcgtagagcagaagaactgggtgtaaaggtcgagtagtagagtaagtgtaaaagggaaaggaaaggagagaaagaggaaacggatgaaatgcagagatctct

SEQ ID NO: 5644 - DNA, 407 bp, Cyanidium caldarium
  Clone ID: LIB190-072-Q1-E1-D5
ggtaccaggtagggaattcccggctcgacccacgcgtacgcccacgcgtccgcggacgcatgggcgaactttggtgacgacgtgtttcatttataaggtgcataataaaatatcattctttaatggcaaaaaaaaaaaaaaaaaaaaaaaaaaaaaaaaaaaaaaaaaaaaaaaaaaaaaaaaaaaaaaaaaaaaaaaaaaaaaaaaaaaaaaaaaaaaaaaaaaaaaaaaaaaaaaaaaaaaaataaaaaaaaaaacgaggcgacgcccaaaaggttcaaacctaattaaagctgttaagtaactgaaaatccctacaaatctgtaaccaaaattgaatttaggtgaaactttttaaaaaattctaaatgggaaaaaacctggatttacaaaatttaacccccttg

SEQ ID NO: 5645 - DNA, 411 bp, Cyanidium caldarium
  Clone ID: LIB190-072-Q1-E1-D8
ggtacctagtaaggaattcccggctcgacccacgcgtacgcaaacgtctatgggcaacggcacgagatggagtcacaaatatacctgtttcggtggtttataaaaaggatttatttcgtcaagatggaacatcgcctctattattggaaggatatggtgcttatgaaataagcaatgaccctagattcgatcctggtttatgtagtctgttggatcgaggtgttgtatttgcagtggcacatgtacgaggtggaggagaattgggcagagattggtatgaacaaggaaaatatttgaataagaagaatacatttaccgactttttggatgtttgtgattatttgttgcaagagaaatactcgagttttggtcgagttgctattatgggaacgagtgctggtggattgttga

SEQ ID NO: 5646 - DNA, 327 bp, Cyanidium caldarium
  Clone ID: LIB190-072-Q1-E1-D9
gtaccggtacggaattcccggctcgacccacgcgtacgggttggtgacaacgacaggtttcgacgtcgacgatggtatgtgtgtttgtgtgtgtcctaaacaaatcaaagatatcaaggaatttctgcttttggtccgcagggaggatgcgagagccatcacaataaagaaagggaagaccaacacgaaattcaaagtccgttgcagcagatatttgtatactttggtagtgaaagaaaaggacaaggcgaacaacttggaacacagtcatccaccaggtttgactttgaaaaagattgattagaaataaactctatcgttgctgtt

SEQ ID NO: 5647 - DNA, 345 bp, Cyanidium caldarium
  unsure at all n locations
  Clone ID: LIB190-072-Q1-E1-E1
ccggtcaggaattcncgggtcgccccacgcgtccgcagaatttttttctaacacatcagcccaaattggcaattggcgccatttcgatagaagatcgtctccattgtaagagtttctaaccaacaatcataatacaagagatacacgtggtcaccatctttagcagatttcagcatatggaaacatggtttggtatgactactgcatactttctttggagacaatgattcgatatccgcttgtgccatttggtcgtccgtctatgaacgacgcctgggaagagcgatatgtctcgaatgttgaaaaaaagatgaatgccgttggtcaaggaattgccatgaaaaa

SEQ ID NO: 5648 - DNA, 378 bp, Cyanidium caldarium
  Clone ID: LIB190-072-Q1-E1-E10
aattccgggctcgacccacgcgtacggactgcgcttcttttcaatcctttcaaatattgagcttggaccatcgaaatcctcggtatatttttgaataaaaaacgagaactaatatggaaaaatatcgaagggttgagcgagccaaaagtccgggccagactccgccgaatcaagtacgaataactgcggcgggcaaagtgccagcctatgtggactatgcagtcaagttgcttcaagaggataatggcaccgtggaaatcgtcgggctgggtaatgccatcaataaggctatcactgtagcagaaatattgaagcgaaaagtccccaagttggagcaagtaacaaatcttagttcggtgactattgaataccgctggg

SEQ ID NO: 5649 - DNA, 425 bp, Cyanidium caldarium
  Clone ID: LIB190-072-Q1-E1-E11
taccggtagggaattcccggctcgacccacgcgtacgggaaagagttcagaagagaaacggacactgttagagagatgtgcacaaacgtgtttaaactccaagttgattgcaggacagaaggaaatgtttgccaaaatggttgtagatgctgtctcttcgttggatcctggaatggatatatctttgattggtataaaaaaggtgcagggtggatcactttcagactctcaactagtacagggagtagctttcaagaagacattttcttatgcaggattcgaacagcagcccaagaaatttatcaatccgaagatagttgttttgaacgtggagttggaactcaagtcagagaaggagaatgcagaagtccgagtggagacgacgcaggactaccaaggaattgtcgatgccgagtgggaacata

SEQ ID NO: 5650 - DNA, 360 bp, Cyanidium caldarium
  Clone ID: LIB190-072-Q1-E1-E12
aggtaccggtcaggaattcccggctcgacccacgcgtacggggaaccttaataaagttcttaagagacagctgtcgttttagtaaaaaaaaaaaaaaaaaaaaaaaaaaaaaaacagggcagacacacaaaaaagcaggacggttgcgtatgctggatatccgacttccttattccttcttgcgtgttcctgactcttcattcacgggccctccttttacttcatcgctcctcgttttacactgtcgtgacgggtcttaacctgcttttacccaagttcaccttcgtgaagtagatccccctttcgccatgctggcatcgtatccccgtcgcactaattgatcagccttcctagcacttg

SEQ ID NO: 5651 - DNA, 421 bp, Cyanidium caldarium
  Clone ID: LIB190-072-Q1-E1-E6
aattcccggctcgacccacgcgtacgaccgaatcagggtaagaggtagaggagcaagaagagaagagagaatgctgggtggagtagcgaaacaagagaagggaagtaaaaggtaagaaagaggaaaggtttacgagagaaggaagtagaaagaagagagtgtaaggcggcgtcataatagaaatccgaaaggagtagaagaaaagagagagaagaaagaaaagaagagaaaagccgtactgaagaccgacacaggtactcgaggagaaaggagacccaaattaaggtgagagaatggacgataaggaactaggcaaaaggatatggtatctgcggtagaacatatgaaagaagcagcaccgactgtttagcaaaaacacagcactctgcaaaaaagagacaatgtaaagtaaagagtgtgc

SEQ ID NO: 5652 - DNA, 394 bp, Cyanidium caldarium
  Clone ID: LIB190-072-Q1-E1-E7
aattcccggctcgacccacgcgtacggaagaaccttggacctatttgttggagcaaattgcggaggcagaaaggatagagttgcactgtggttggtccaaggaggatcgagaaaaccttcttgttgcgttgaaagagacaaaacaattagatgcaacagtcctttcgcaacatgtgaaaagcaaaagccctgaggaaataaccgaatatctaaaagtattaaaggacagacttgggaagaaagatgacgaaggaatgcagccagatgtatctttttatgctgctttgctatctttggagttgtatcatagtggagccatttcccctggtggtttgttttctaaaaaactggaacatatggacaagaacacggttttccacgattccgtgtctca

SEQ ID NO: 5653 - DNA, 353 bp, Cyanidium caldarium
  Clone ID: LIB190-072-Q1-E1-F10
taccggtacggaattcccggctcgacccacgcgtacgcccacgcgtccgggagacgttggctggtatgtggttcgatttattctatcatttgttggatacgatcgtaaagttatttcggtgtatgcagttggcaatgaaacggaaggaggatcgatggacgattgcgcaggagttgtggagtttgaagagaacattactgcacactttgactgtggattcacaagtggttatagacaatggggtgaatgtttaggtacacttggaatgttgagagtggaacgttttcaaggagctcccgttcctaagaatacagaagagaaggatcccaaattgcacgtcgaatttcatcaac

SEQ ID NO: 5654 - DNA, 344 bp, Cyanidium caldarium
  unsure at all n locations
  Clone ID: LIB190-072-Q1-E1-F11
cattcncggctcgacccacgcgtaagcccacgcctccggcatacgttgcctcgtacatagttctccctattctaccatttcatatgcatcccatcgtcaacttatttccgtgtacgcagttgacaacgaaggggaacgaggatccatggaccattgcgcacgagttctccactttcaccacaacatcactccacactttcactgtccattcacacctcgttatacgacaatggcgtcaatgtctacgtacacttcccatgttgccactcgcccctcttcaccgacctcccgttcctaacactacagcagacaccgatcccaattttctcttccactgtcctcaa

SEQ ID NO: 5655 - DNA, 444 bp, Cyanidium caldarium
  Clone ID: LIB190-072-Q1-E1-F12
ggtaccggttaggaattcccggctcgacccacgcgtacgcccacgcgtccgcgcaaagatagatggacagatctccttggaggctgggttcgtttcttattaaaggtgctgcaggaacagtacgttcctccctccattctgatgttgggaacagaactttacagagattcggacttgtttcaagtaaatccaaaaagtccagtggcagacacatgtctcctgcagagtcgcaccttagtctatgtttgaaacacgtattcttacagccacgtgtacggttgcgtagtattatgtttatccactttttatgtactccctttgtattactgcttctttttgcctggtatttaccgagttctccagaattttgggtatactttgcactgcattccgctcgagcctggttgtggattttaaaaaacttgtgctttccagatttcatat

SEQ ID NO: 5656 - DNA, 209 bp, Cyanidium caldarium
  Clone ID: LIB190-072-Q1-E1-F3
cgacccacgcgtaagcccacgcgtccgcggacgcgtgggcacagattccgttgtgcagaatgacgccgtggatagcacttcagacatgtatgatgaattgacctatttagttcaaaattgcgaagttactgaaccgaagaacaaattgaatggcttcttaccttatatttggtaaattgtgaaaaatatattttcttttattcataatg

SEQ ID NO: 5657 - DNA, 420 bp, Cyanidium caldarium
  Clone ID: LIB190-072-Q1-E1-F6
aattcccgggtcgacccacgcgtacggcaaattggcagagttttgtcaaaaagtaccaggactccgtggactgtacaactttttagctcgcgtgcatataagaggtgtagaaagagagttgcgcaagtacggactgagatacgatgaccttctcaacgagcaagatccggacgtgaaaaaagctcttgaaatgctcccggaacatgagaagcagttgagagccaagcgttttattcgagcgtttgatttgtcgatgaagaagactcacttacccgatgaaatagcacaaaaggaagatatttggaacccatacttgagaagtcgcatcgagctgattcgtaaagaaaagcatcgaaatgagacctacaaataaacaacaataaaagtaaaagtttttcccctttggtttgggggggcggt

SEQ ID NO: 5658 - DNA, 398 bp, Cyanidium caldarium
  Clone ID: LIB190-072-Q1-E1-F7
ggtaccagtcaggaatgcccggctcgacccacgagtcaggcgcagactggtagaaacaattgctcctaagcgcgatgatatagcaactccaaaaaatatggaaccgaaagcgcttagcatgttttgtactctactgttgtcttccatgctcgagtatcgttttactattacggagactatctacggtggttctgttattggagataactcgaaatattttttagatgttgccaataactttggcttttattatgagtattgcacaggtggaatattatcagacgacaaaatggaagaagacgaaatggacgagatgaacgagggaaatgttcaaatgctcaagttaatatttccgaaaattgttttcgaaggtattaagaaagagtatttggactacc

SEQ ID NO: 5659 - DNA, 421 bp, Cyanidium caldarium
  Clone ID: LIB190-072-Q1-E1-F8
tacaagtcaggaattcccggctcgacccacgcgtacggactttgtgtgcagtgttgaccaaacagggactcgacagatatggcttccggtgttgcagtagacgatacatgcggaaaggagttcactgttcttgtgagaagcacgccaagaaagtaccgtgctattattttcaaactcactgatgacctgtcttctgtatgtgtggaaaagacgcttcccgcagccaacataaccaagtgcagtgcacaagaagactggaaaaagtttgtgactgaattgccccaaaacgattgtcgttttgcagtatatgactttgagtatcaaacttctgaaggtgtttccaaaaatagaataatattcattctttggtcacctgaaagtgcgaagataaagtcaaagatgttgtaatcttcatccagag

SEQ ID NO: 5660 - DNA, 317 bp, Cyanidium caldarium
  unsure at all n locations
  Clone ID: LIB190-072-Q1-E1-G1
cggtcaggaattcncggctcgaccacgcgtcagagtttggttgttttcttggtagcagttgtacattcaacatcatcaaatgccaaagggaggaaagaaagattcttcaaagaaagaagccacaagtaaacctgcagcagcagatgctacaaagacgacagaaaagtctggtccggaagccaagttgaagggaactggtgcaaagaaacaataaaaagttgactatgcatgtgcagtcctgttatgttttgtgagttctgtttgatagtttccagctattcttttggtagtgaataaagagaaaattttttatattt

SEQ ID NO: 5661 - DNA, 420 bp, Cyanidium caldarium
  Clone ID: LIB190-072-Q1-E1-G10
aattccgggctcgacccacgcgtacgagaaagtaaggaataagaacgaagaactacgacaaaaacgccaaagattagaagagttggaagctcagaagagagctgtagaagccatgttggcccgaaatgcttcgagttcagcttctgaacttcagccagaaagctgcatacatcttccttttattatcgtttctaccagtgcagacacttctatcgatgtggaaatggaagaaaatgcggaagaagttttattcacttttaatagaccttttgaaatatacgatgaccaagtcattttgcaaggaatatttcgaaacacaaatgtttccaacagaagagacgaacatgaaaacgtatcggtttctgagaagcaagcatattcaagtaattctagacagtccagtgagccaagtcaacattc

SEQ ID NO: 5662 - DNA, 437 bp, Cyanidium caldarium
  unsure at all n locations
  Clone ID: LIB190-072-Q1-E1-G11
gtaccggtagggaattcccggctcgacccacgcgtacgcggacgcgtgggctagcattactgcaagtggtggttgagttgcagagagtgcaactgtagcgagcatagatttatctccccactctgcggtgaaaatgatggagaagacttgaagtatttgacccaacgcaatatttccaaaagcaccatattgagattcggagcttgatgcatattccttactgtaaaaatcatcctggctttggtttacttgggacggagtttccttcagatatgcacgtatattatcgaccccgaaccaaaacaacaaagcagttgcaatataatcatcgataggaagggtatgtaatgagctgggaaatgcatgaaacaattgtccaatcagtacggaaagaatcgtcataacaagaagtgccgtgagagttgcaacanacacta

SEQ ID NO: 5663 - DNA, 429 bp, Cyanidium caldarium
  Clone ID: LIB190-072-Q1-E1-G12
taccggttaggaattcccggctcgacccacgcgtacggttttggggtttgtttgggtgaagatggcgcactatcaacattaccgagctagtacagcgggtatagctttgggagaagcactttctgaactcaaggaacagaagctctttacggaagcggaagaagatgtgatttggaggaagtttgaccgtgccatgacagaagcccttgcgtccaacgttgtggatacacaccttacgttgaaagtaagtccttgagcctttcttagcagcctttaaccttgcttaggggagtcttcatcactatcgattctgtgataatgtgtggcaattcttcgtgaaagacgcacaagtgaaatttgacaaaaggtcggattttactcccgctggttatctgaaagtagttgcttgtgattatgtaaagccaacca

SEQ ID NO: 5664 - DNA, 449 bp, Cyanidium caldarium
  unsure at all n locations
  Clone ID: LIB190-072-Q1-E1-G3
taccggtcagcgaattcccggctcgacccacgcgtacggtgatgaggacaagtcggtggtcgcgagctgctttatcttttttgatttctaccgcggttacaaagtcttatcatcctcataataacacacacgattatgtctccttgtatttcttgccattgtatcgcaactgggttcaacgcgttggaattcatagcgttccttttgtactagctaatgatactggtgactccttgaaaaaacaagaaaaggctgataaagttcaaaagaagacaaagaagaaaggctccacaacggattccaaaaaggtaaaaaaggccagcctcgagtcgcagccggaagatggtgcggaaacaaaggttgaacctcctccaaaagagaagaagtttaagaanaagaaggatcctgaaacagcgatacctgaatatgccatccaaagcttttttgag

SEQ ID NO: 5665 - DNA, 257 bp, Cyanidium caldarium
  Clone ID: LIB190-072-Q1-E1-G4
accggttagggattcccggctcgccccacgcgtccggacacgcgtccggatcgatgcacacacaggaaagcagtacaacaagacagagaaaggaggaacctgagtatcacgacgacaagagggagtacatgaggacagacacgatcagggaactaacagtaagagaacgactaatgtgaatgacagcaggaacgtatttgaacacgagagtgtaacgcgcgtaccttttgcatcatgtcccagcgagtgaacgagga

SEQ ID NO: 5666 - DNA, 418 bp, Cyanidium caldarium
  Clone ID: LIB190-072-Q1-E1-G5
ccgcccaggtaccagttaggaatgcccggctcgacccacgagtacggtcagttcttccgatgaattccgcccttttgtaagaagattacctgaattcaaattctggctttctgccactcgagctaccgtccttgctttgtttgctaccgcgtttcgattcctggacatacccgtattttggcctatcttggttatttacttcattctgctttttgttgcaactatgagaaggcagattgcggatatgattcaataccgttatttaccttttaacattggcaaaaagaaatactcaagttcttccaagtttgtggcaaggcgacaagaagcccatgataacgatgctgttgcgttgaaaagttccgcaaacgtcaaacttccaacttcagtggaacccccgaggaatagtgcgactccg

SEQ ID NO: 5667 - DNA, 378 bp, Cyanidium caldarium
  Clone ID: LIB190-072-Q1-E1-G6
aggtactagtctggaattcccggctcgacccacgcgtacgcccaagcatccggaaagaggcagctacgggaaagcagtaagacaagaaagacacaggaatcaactgagtaacaggaataaggaagggagtaaatcatgaaataaagatcaaggaattaagaataagagaacgagtaatgtggatgaaagcacgaaagtatttgaagaagatagtgtaaagcacgtaccttttgcaaaatgtcccatcgagtgaaataggatgcacaaacaaaggcatagaagtagtcaggtaacacccgcatctatttgatcttatgctgtccattcaaagtagggctgaaccactatctgtgagaaaagatttgggagagatcgcat

SEQ ID NO: 5668 - DNA, 421 bp, Cyanidium caldarium
  Clone ID: LIB190-072-Q1-E1-G7
gaatgcccggctcgacccacgagtcagcaagatggaaaggaacaaaaggaaactagttcgaaagcagaaaaacagaaacaacgttgcgaaagactaaagaatcgagcgctgcagagagataagagagtattgtttatgttggaacaaataaggaaagccggctgttatctccctgaggagcgcattctttgtcaacattgtgaggctgctgtaggaggtggttttcaagacgatggtagcgtcgtcctttgttcgaatcacttactatctcaggatcacgctaatgtcacgcttgttcacgagttggtacacgcttttgatcagtgtcgagcacacgtgaactggtcagactgtacccatcacgcttgtagtgaaattcgtgcgggtttattaagtggtgactgtgattggaaacgagagt

SEQ ID NO: 5669 - DNA, 114 bp, Cyanidium caldarium
  Clone ID: LIB190-072-Q1-E1-H1
aggtgaaaaacaacaaaataacacaaaacaacaaccaaaacaaaaaaaaaaaaaaaaaaaaaaaaaaaaaaaaaaaaaaaaaaaaaaaaaaaaaaaaaaaaaaaaaaaaaaaga

SEQ ID NO: 5670 - DNA, 455 bp, Cyanidium caldarium
  Clone ID: LIB190-072-Q1-E1-H10
acgccgacaggtaccggttaggaattccgggctcgacccacgcgtacgccttgtgtgagtgttcctggagtgaagacgaaatatgagaatgtgaatgtcgttacagttcgtgagaatacagaaggagaatacagcggtttggaacacgtggtgtatccaggtgtggtagaaatgatcaaattgatcacgagagaagcttcgttgcgcgttgctagatatgcttttgaatatgcgaagaacaatcaaagaaaaatggtaactgcagttcataaagcaacggtgatgaaacgagcagatggtctctttttagaatgttgtcgagaagtggctcaagaatatccgaatattcaatatgaagaattgttgatcgatacatgtgctgctcgcttggtacagaatccttcgcgtttggatgtcatggtgatgcccaatttatatggcgatatactcagtga

SEQ ID NO: 5671 - DNA, 312 bp, Cyanidium caldarium
  Clone ID: LIB190-072-Q1-E1-H12
cgacccacgcgtacggggccaacgaacccgtcggacatacgtttttcatatcaactattagatggcttgaagaaagctgtctatataactgcgacagcaccctttttgcactatcaccaggaaatacatggaaattctttctgcactatcaatatatgggcagtgccattacaagccacaacactaccagttcaccacatgattatgatgccacatggtttactttccaaaaccttgtggacactgccgtgccaatccacccgttgtaggttgtatccagacatgcaggttcagcatgggtccaactcattt

SEQ ID NO: 5672 - DNA, 354 bp, Cyanidium caldarium
  Clone ID: LIB190-072-Q1-E1-H4
cacgcgtcaggaaaaatagtagagaagaaatcgatgaaagtgaaagcgagtaaaagatgaggtatagagaatggcggtcctaactgtaaggatccaaaggtagcgaagtaaatagacgtttgaaaggcgtccagtatgaaaggagaaacgagtgtaccactgtctagtcgtccaactcagcgaaacagcaataactgtgaaaatgcagtaaactagcagtaggacggaaagaccccataattcttgactagataggtttagggaggagagagaatcatgaagtagaggaggtggggtaagagatgaaagaccactgcatgaggataaggaatctaactgagtaaggaaaataag

SEQ ID NO: 5673 - DNA, 363 bp, Cyanidium caldarium
  Clone ID: LIB190-072-Q1-E1-H6
cggctcgacccacacgtacgatcttattgattggctgattggcgcaactcgttgtttggctttctttttggaaacaaaagacagtcgtctctggtaaaatggcaagtagagtaccttggaataactttcgtatgccttttggtggtggtggcggtggtggtcctagtggtcctgcggttcgagttgcaggtttggctattgcaggtatcgctacagctgccattggttataaatatggtttatacaacgtggacggtggtcatcgagcggttattttcaacaagtttacgggagtcagaccaaaagtttatggagaaggaactcaccttcgaataccattctttgacgttcccatcatttatg

SEQ ID NO: 5674 - DNA, 417 bp, Cyanidium caldarium
  Clone ID: LIB190-072-Q1-E1-H7
aattcccggctcgacccacgcgtacggtgagtcgtggtgctgtcttagcaaacttttcctcttgtgaacgtggtctataaaagtccctttggaaactttaaaactggttatattcagtagatattgtaaaaaagtagctctcgagccaccgaccaaccagccaagcaattcatatcgagactgtctgcagaactacgaagatgccaaccatgtttgttgtgacgcattggttacccaagctttttgaggagtccttgcaaagaagaaacgtttgttcgccgatgaaattgaagagaaagttgtatttctgtaagggttcgtattcgtgccagcgtatcctcgcaaccatggaacaaacgagtacgacagagttgcgcccccacgtaaactggttagaaaatcgttgggtttggcagg
